(19) United States
(12) Patent Application Publication
(10) Pub. No.: US 2004/0142413 A1
(43) Pub. Date: Jul. 22, 2004

(54) Isolated genome of xyllela fastidiosa and uses thereof

(76) Inventors: Andrew Simpson, New York, NY (US); Fernando Reinach, Sao Paulo (BR); Joao Setubal, Campina (BR); Joao Meidanis, Campinas (BR); Paulo Arruda, Campinas (BR)

Correspondence Address: FULBRIGHT & JAWORSKI, LLP, 666 FIFTH AVE, NEW YORK, NY, 10103-3198, US

(21) Appl. No.: 10/297,465

(22) PCT Filed: Jun. 7, 2001
(86) PCT No.: PCT/IB01/01618

(51) Int. Cl. C07H 21/04; C12N 1/21; C07K 14/195

(52) U.S. Cl. 435/69.1; 435/252.3; 435/320.1; 530/350; 536/23.7

(57) ABSTRACT

The complete genome Xyllela Fastidiosa has been isolated and sequenced. The complete sequence can be placed on various computer readable media, and used diagnostically.

### FIELD OF THE INVENTION

[0001] This invention relates to plant pathogens. More specifically, it relates to the determination and analysis of the genome of the important plant pathogen Xyllela fastidiosa, and its analysis. Various uses of the information are described as well.

### BACKGROUND AND PRIOR ART

[0002] Xyllela fastidiosa is a fastidious, xylem limited bacterium that is known to cause a variety of important plant diseases, such as citrus variegated chlorosis (“CVC”). See, e.g., Rosseti, et al, C.R. Acad. Sci. Paris série III 310:345-349 (1990). Symptoms of X. fastidiosa infection include conspicuous variegation on older leaves, with chlorotic areas on the upper sides, and corresponding light brown lesions, as well as gum like material on the lower side. Affected fruits are small, hardened, and of no commercial value.

[0003] Xyllela fastidiosa was identified as the causative agent in 1993 (Chang, et al, Curr. Microbiol 27:137-142 (1993)), and was found to be transmitted by sharpshooter leafhoppers, in 1996. (See Roberto, et al, Filopatol Bras. 21:517-518 (1996)). At present, control of the pathogen is limited to removal of infected shoots via pruning, the application of insecticides, and replacement of plants with healthy plants.

[0004] In addition to CVC, referred to supra, X. fastidiosa strains cause plant diseases such as Pierce's disease of grapevines, alfalfa dwarf, phony peach disease, periwinkle wilt, and leaf scorch of plum. The bacterium is also associated with diseases of mulberry, pear, almond, elm, sycamore, oak, maple, pecan, and coffee. See Purcell, et al, Annu Rev. Phytopathol 34:131-151 (1996). Given the broad range of pathologies with which this bacterium is associated, it would be useful to be able to diagnose or to determine presence of the bacterium in a plant, a plant part, or group of plants, such as an orchard, as well as to have available more useful approaches for eliminating the bacterium from a host.

[0005] To this end, the inventors have determined the complete genomic sequence of X. fastidiosa, as described herein. Further, the inventors have analyzed the genome, providing a map of genes within the genome. This permits the artisan to develop strategies for combatting X. fastidiosa infection, as described infra.

### BRIEF DESCRIPTION OF THE FIGURES

[0006] FIG. 1, parts a-d, depicts a map of the X. fastidiosa chromosome. The figure is best read by placing panels a-d in a horizontal array, with panel a at the left, moving to the right, with d as the last panel. Each arrow indicates an individual gene within the chromosome. FIG. 2 depicts the biochemical processes involved in X. fastidiosa pathogenicity and survival in host xylem. Major functional categories are in bold, with bacterial genes and gene products related to that function indicated with the bold heading. In FIG. 2, the following code is employed:

[0007] cylinders are channels;

[0008] ovals are secondary carriers, including the MFS family;

[0009] paired dumbbells are secondary characters for drug extrusion triple dumbbells are ABC transporters the bulb-like icon is an F-type ATP synthase;

[0010] squares are other transporters.

[0011] Any icon with two arrows indicates symporters and antiporters (these are H⁺ or Na⁺ porters, unless otherwise noted).

### DETAILED DESCRIPTION OF PREFERRED EMBODIMENT

[0012] Sequence information as described herein may also be found in the GenBank database, under the following accession numbers: AE003849 (the chromosome); AE003850 (plasmid pXF1.3), and AE003851 (plasmid pXF51).

### EXAMPLE 1

[0013] The experiments which follow utilized triply cloned X-fastidiosa 9a5c, which was derived from a pathogenic culture referred to as 8.1b, that had been obtained in 1992 in Bordeaux, France, from CVC affected Valencia sweet orange twigs that had been collected in Macaubal, Sao Paolo, Brazil, on May 21, 1992. See Chang, et al, Curr. Microbiol. 27:137-142 (1993). This strain produces typical CVC symptoms upon inoculation of citrus plants (Li, et al, Curr. Microbiol 39:106-108 (1999)), and has also produced such symptoms in Nicotania tabacum and Catharantus roseus.

[0014] A combination of ordered cosmid and shotgun strategies was used, in accordance with Fleischmann, et al, Science 269:496-512 (1995), incorporated by reference. This technique has been used to sequence and assemble the entire genome of H. influenzae. See, e.g., EP 0821737 to Fleischmann et al, as well as WO9633276, both of which are incorporated by reference. The resulting cosmid library provided approximately 15-fold genome coverage, including 1056 clones, having an average insert size of 40 kilobase pairs.

[0015] High density colony filters of this library were made, and a physical map was constructed, in accordance with Hoheisel, et al, Cell 73:109-120 (1993), using a strategy of hybridization without replacement. The Hoheisel reference is incorporated by reference.

[0016] A total of 113 cosmid clones were selected for sequencing based upon the hybridization map and end sequence analysis.

[0017] Cosmid sequences were assembled into 15 contigs, covering about 90% of the genome. Further, shotgun libraries, with insert sizes ranging from 0.8 to 2.0 kilobase pairs, and 2.0 to 4.5 kilobase pairs were constructed from nebulized or restricted genomic DNA cloned into plasmids. These were sequenced to achieve 3.74 fold coverage of high quality sequence

[0018] (29,140) reads). Most of this sequencing was performed with “Big Dye” terminators, on “ABI Prism 377” DNA sequences.

[0019] Cosmid and shotgun sequences were assembled into 6 contigs, and then sequence gaps were identified by linking information from forward and reverse reads, and closed by one of primer walking or insert subcloning.

[0020] Remaining gaps were closed via combinatorial PCR, and by lambda clones selected from a λ DASH library, via end sequencing.

[0021] Colinearity between the genome and obtained sequence was confirmed via digestion of the genomic DNA with AscI, NotI, SfiI, SmiI and SrfI, followed by comparison of the digestion pattern with the electronic digestion of the generated sequence.

[0022] Further, sequences from both ends of the majority of cosmid clones, and 236 λ clones were used to confirm orientation and integrity of contigs. Gordon, et al, Genome Res 8:195-202 (1998), incorporated by reference, was used for the assembly. All consensus bases were of high quality, with Phred values of at least 20. No unexplained high quality discrepancies were found, and each consensus base was conformed by at least one read from each strand. Overall error estimate was less than one in every 10,000 bases.

### EXAMPLE 2

[0023] Following the work described in example 1, open reading frames (“ORFs”) were analyzed, in accordance with Delcher, et al, Nucleic Acid Res 27: 4636-4641 (1999), incorporated by reference. A few ORFs were determined by hand, using Altschul, et al, Nucleic Acids Res 25:3389-3402 (1997), also incorporated by reference. Annotation was facilitated, via comparison to public databases, using BLAST (Altschul, et al, supra), tRNAscan-SE (Lowe, et al, Nucleic Acids Res 25:955-96A (1997), and the functional categories for E. coli, described by Riley, et al, Microbiol Rev 57:862-952 (1993), also incorporated by reference.

[0024] In the specific category of transport proteins, ORFs were compared to the custom database found at http://www.biology.ucsd.edu/˜msaier/transport/toc.html, and phylogenetic trees for conserved “COGS” (Tatusov, et al, Nucleic Acids Res 28:33-36 (2000)), were built using the methods of Thompson, et al, Nucleic Acids Res 25:4876-4882 (1997), and Felsenstein, et al, Cladistics 5:164-166 (1989). These three references are all incorporated by reference.

[0025] Paralogous gene families were then determined in accordance with BLASTX, using an E value cut off equal to e-5, such that at least 60% of the query sequence, and at least 30% of the subject sequence were aligned.

[0026] What follows is an analysis of the genome.

[0027] General features of the genome. The basic feature of the genome are listed in Table 1 and a detailed map is shown in FIG. 1. The conserved origin of replication of the large chromosome has been identified to a region between the putative 50S ribosomal protein L34 and gyrB genes containing dnaA, dnaN and recF. Ye et al, Curr. Microbiol 29:29-39 (1994). The Escherichia coli DnaA-box consensus sequence TTATCCACA is found on both DNA strands close to dnaA. In addition, there are typical 13-mer (ACCACCACCACCA) and 9-mer (two TTTCATTGG and two TTTTATATT) sequences in other intergenic sequences of this region. This region is coincident with the calculated GC-skew signal inversion. Francino, et al, Trends. Genet. 13:240-245 (1997). The first T of the only TTTTAT sequence in the X. fastidiosa genome found between the ribosomal protein L34 gene and dnaA has been designated base 1.

[0028] The overall percentage of ORFs for which a putative biological function could be assigned (47%) was slightly below that for other recently sequenced genomes such as Thermotoga maritima (Nelson, et al, Nature 399:323-329(1999)) (54%), Deinococcus radiodurans (White, et al, Science 286: 1571-1577 (1999)) (52.5%) or Neisseria menningitidis (Tettelin, et al, Science 287:1809-1815 (2000)) (53.7%). This may reflect the lack of previous complete genome sequences from phytopathogenic bacteria Plasmid pXF1.3 contains only two ORFs, one of which encodes a replication-associated protein. Plasmid pXF51 contains 64 ORFs, of which five encode proteins involved in replication or plasmid stability and 20 encode proteins potentially involved in conjugative transfer. One ORF encodes a protein similar to the virulence-associated protein D (VapD), found in many other bacterial pathogens. (Katz, et al, Infect. Immun 60:4586-4592 (1992)). Four regions of pXF51 present significant DNA similarity to parts of transposons found in plasmids from other bacteria, suggesting interspecific horizontal exchange of genetic material.

[0029] The principal paralogous families are summarized in Table 2. The complete list of ORFs with assigned function is shown in Table 3. Seventy-five proteins present in the 21 completely sequenced genomes in the COG database (Tatusov, et al, Nucleic Acids Res 28:33-36 (2000)) as of Mar. 15th, 2000, were also found in X.fastidiosa. Each of these sequences was used to generate a phylogenetic tree of the 22 organisms. In 69% of such trees X.fastidiosa was grouped with Haemophilus influenzae and Escherichia coli, consistent with a phylogenetic analysis undertaken with the 16S rRNA gene (Preston, et al, Curr. Opin. Microbiol 1:589-597 (1998)).

[0030] One ORF, a cytosine methyltransferase (XF1774), is interrupted by a Group II intron. The intron was identified on the basis of the presence of a reverse transcriptase-like gene (as in other Group II introns), conserved splice sites, conserved sequence in structure V and conserved elements of secondary structure (Knoop, et al, J. Mol. Biol 242:389-396 (1994)). Group II introns are rare in prokaryotes, but have been found in different evolutive lineages including E. coli, cyanobacteria and proteobacteria (Ferat, et al, Nature 364:358-361 (1993)).

[0031] Transcription, translation and repair. The basic transcriptional and translational machinery of X. fastidiosa is similar to that of E. coli (Blattner, et al, Science 277:1453-1474 (1997)). Recombinational repair, nucleotide and base excision repair and transcription-coupled repair are present with some noteworthy features. For example, no photolyase was found, implicating exclusively dark repair. Although the main genes of the SOS pathway, recA and lexA, are present, ORFs corresponding to the three DNA polymerases induced by SOS in E. coli (DNA polymerases II, IV and V) (Bridges, Curr. Biol 9:R475-R477 (1999)) are missing, indicating that the mutational pathway itself may be distinct.

[0032] Energy metabolism. Even though X. fastidiosa is, as its name suggests, a fastidious organism, energy production is apparently efficient. In addition to genes for all the components of the glycolytic pathway, all genes for the tricarboxylic acid cycle as well as the oxidative and electron transport chains are present. ATP synthesis is driven by the resulting chemiosmotic proton gradient and occurs via an F-type ATP synthase. Fructose, mannose and glycerol can be utilised in addition to glucose in the glycolytic pathway. A complete pathway for hydrolysis of cellulose to glucose, consisting of 1,4-β-glucanase, and β-glucanase, and β-glucosidase, is present, suggesting that cellulose breakdown may supplement the often low concentrations of monosaccharides in the xylem (Brodbeck, et al, Arch. Insect Biochem. Physiol 42:37-50 (1999)). Two lipases are encoded in the genome, but there is no β-oxidation pathway for the hydrolysis of fatty acids, presumably precluding their utilisation as an alternative carbon and energy source. Likewise, although enzymes required for the breakdown of Thr, Ser, Gly, Ala, Asp and Glu are present, pathways for the catabolism of the other naturally occurring amino acids are incomplete or absent.

[0033] The gluceonogenesis pathway appears to be incomplete. Phosphoenolpyravate carboxykinase and the gluconeogenic enzyme fructose-1,6-bisphosphatase, required to bypass the irreversible step in glycolysis, are not present. The absence of the first is compensated by the presence of phosphoenolpyruvate synthase and malate oxidoreductase, which together can generate phosphoenolpyruvate from malate. There appears, however, to be no known compensating pathway for the absence of the other enzyme. It is possible that among the large number of unidentified X. fastidiosa genes there are non-homologous genes that compensate for steps in such critical pathways. However, barring this possibility, the absence of a functional gluconeogenesis pathway implies a strict dependence on carbohydrates both as a source of energy and anbolic precursors. The glyoxylate cycle is absent and the pentose phosphate pathway is incomplete. In the latter, genes for neither 6-phosphogluconic dehydrogenase nor transaldolase were identifiable. Small molecule metabolism. X. fastidiosa exhibits extensive biosynthetic capabilities, presumably an absolute requirement for a xylem-dwelling bacterium. Most of the genes found in E. coli necessary for the synthesis of all amino acids from chorismate, pyruvate, 3-phosphoglycerate, glutamate and oxaloacetic acid (Blattner, et al, supra) were identified. However, some genes in X. fastidiosa are bi-functional, such as: phosphoribosyl-AMP cyclohydrolase/phosphoribosyl-ATP pyrophosphatase (XF2213), aspartokinase/homoserine dehydrogenase I (XF2225), imidazoleglycerolphosphate dehydratase/histidinol-phosphate phosphatase (XF2217) and a new diaminopimelate decarboxylase/aspartate kinase (XF1116) that would catalyse the first and the last steps of lysine biosynthesis. In addition, the gene for acetylglutamate Kinase (XF1001) has an acetyltransferase domain at its carboxyl-terminal end that would compensate for the missing acetyltransferase in the arginine biosynthesis pathway. Other missing genes include phosphoserine phosphatase, cystathionine β-lyase, homoserine O-succinyltransferase and 2,4,5-methyltetrahydrofolate-homocysteine methyltransferase. The first two enzymes are also absent in the Bacillus subtilis genome, the third is absent in Haemophilus influenzae and the fourth is missing in both genomes (Tatusov, et al, supra). It is presumed that alternative, as yet unidentified enzymes complete the biosynthetic pathways in these organisms as well as in X. fastidiosa.

[0034] The pathways for the synthesis of purines, pyrimidines and nucleotides are all complete. In addition, X. fastidiosa is apparently capable of both synthesizing and elongating fatty acids from acetate. Again, however, some enzymes present in E. coli were not found, such as holo acyl-carrier-protein synthase (also absent in Synechocystis sp., H. influenzae and Mycoplasma genitalium) and enoyl-ACP reductase (NADPH) (FabI) (also absent from M. genitalium, Borrelia burgdorferi and Treponema pallidum).

[0035] Xylella fastidiosa appears to be capable of synthesizing an extensive variety of enzyme cofactors and prosthetic groups including biotin, folic acid, pantothenate and coenzyme A, ubiquinone, glutathione, thioredoxin, glutaredoxin, riboflavin, FMN, FAD, pyrimidine nucleotides, porphyrin, thiamin, pyridoxal 5′-phosphate and lipoate. In a number of the synthetic pathways, one or more of the enzymes present in E. coli are absent, but this is also true for at least one other sequenced Gram-negative bacterial genome in each case (Tatusov, et al, supra . Again, it is inferred that the missing enzymes are either not essential or are replaced by unknown proteins with novel structures.

[0036] Transport-related proteins. A total of 140 genes encoding transport-related proteins were identified, representing 4.8% of all ORFs. For comparison, E. coli, B. subtilis and M. genitalium have around 10% of genes encoding transport proteins, while Helicobacter pylori, Synechocystis sp. and Methanoococcus jannaschhii have 3.5 to 5.4% (Paulsen, et al, J. Mol. Biol. 277:573-592 (1998)). Transport systems are central components of the host-pathogen relationship depicted in FIG. 2. There are a number of ion transporters as well as transporters for the uptake of carbohydrates, amino acids, peptides, nitrate/nitrite, sulphate, phosphate and vitamin B12. Many different transport families are represented and include both small and large mechanosensitive conductance ion channels, a monovalent cation:proton antiporter (CAP-2) and a glycerol facilitator belonging to the major intrinsic protein (MIP) family. In addition, 23 ABC transport systems, comprising 41 genes can be identified. Xylella fastidiosa appears to possess a phosphotransferase system (PTS) that typically mediates small carbohydrate uptake. Both the enzyme I and Hpr components of this system are present, as well as a gene supposedly involved in its regulation (pstK or hprK); however no PTS permease, an essential component of the phosphotransferase complex, was found. The functionality of the system thus remains in question.

[0037] There are five outer membrane receptors, including siderophores, ferrichromeiron and hemin receptors that are all associated with iron transport. The energizing complexes, TonB-ExbB-ExbD and the paralogous TolA-TolR-TolQ, essential for the functioning of the outer membrane receptors, are also present. In all, some 67 genes encode proteins involved in iron metabolism. It is proposed herein that in X. fastidiosa the uptake of iron and possibly of other transition metal ions such as maganese causes a reduction in essential micronutrients in the plant xylem, contributing to the typical symptoms of leaf variegation.

[0038] The X. fastidiosa genome encodes a battery of proteins that mediate drug inactivation and detoxification, alteration of potential drug targets, prevention of drug entry as well as active extrusion of drugs and toxins. These include ABC transporters and transport processes driven by a proton gradient. Of the latter, eight belong to the hydrophobe/amphiphile efflux-1 (HAE1) family, which act as multidrug resistance factors.

[0039] Adhesion. Xylella fastidiosa is characteristically observed embedded in an extracellular translucent matrix in planta (Chagas, et al, J. Phytopathol 134:306-312 (1992)). Clumps of bacteria form within the xylem vessels leading to their blockage and symptoms of the disease such as water-stress leaf curling. We deduce, from our analysis of the complete genome sequence, that the matrix is composed of extracellular polysaccharides (EPSs) synthesized by enzymes closely related to those of Xanthomonas campestris pv campestris (Xcc) that produce what is commercially known as xanthan gum. In comparison with Xcc, however, gumI, encoding glycosyltransferase V (which incorporates the terminal mannose), gumL (encoding ketalase which adds pyruvate to the polymer) and gumG (encoding acetyltransferase which adds acetate) were not found, suggesting that Xylella gum may be somewhat less viscous than its Xanthomonas counterpart.

[0040] Positive regulation of the synthesis of extracellular enzymes and EPS in Xanthomomomas is effected by proteins coded by the rpf (regulation of pathogenicity factors) gene cluster. Mutations in any of these genes in Xanthomomas results in failure to synthesize the EPS. In consequence the strain becomes non-pathogenic (Tang, et al, Mol. Gen. Genet 226:409-417 (1991)). Xylella fastidiosa contains genes that encode RpfA, RpfB, RpfC, and RpfF, suggesting that both bacteria may regulate the synthesis of pathogenic EPS factors via similar mechanisms.

[0041] Fimbria-like structures are readily apparent upon electron microscopical observation of X. fastidiosa within both its plant and insect hosts (Raju, et al, Plant Disease 70:182-186 (1986)). Because of the high velocity of xylem sap passing through narrow portions of the insect foregut, fimbriae-mediated attachment may be essential for insect colonization. Indeed, within the insect mouthparts, the bacteria are attached in ordered arrays indicating specific and polarized adhesion (Brlansky, et al, Phytopathology 73: 530-535 (1983)). In addition, fimbriae are suspected of playing a role both in plant-bacterium and bacterium-bacterium interactions during colonisation of the xylem itself. Twenty-six genes encoding proteins responsible for the biogenesis and function of Type-4 fimbriae filaments were identified. This type of fimbria is found at the poles of a wide range of bacterial pathogens where they act to mediate adhesion and translocation along epithelial surfaces (Fernandez, et al, FEMS Microbol. Rev 24:21-44 (2000)). The genes include pilS and pilR homologs, which encode a two-component system controlling transcription of fimbrial subunits, presumably in response to host cues, as well as pilG, H, I, J, and chpA, which encode a chemotactic system transducing environmental signals to the pilus machinery.

[0042] In addition to the EPS and fimbriae, likely to play central roles in the clumping of bacteria as well as adhesion to the xylem walls, we also identified outer membrane protein homologues for a fimbrial adhesins. Although fimbrial adhesins are well characterised as crucial virulence factors in both plant and human pathogens (Soto, et al, J. Bacteriol 181:1059-1071 (1999)), afimbrial adhesins, which are directly associated with the bacterial cell surface, have been hitherto associated only with human and animal pathogens where they promote adherence to epithelial tissue. Of the three putative adhesins of this kind identified in X. fastidiosa, two exhibit significant similarity to each other (XF1981 and XF1529) and to the hsf and hia gene products of H. influenzae (Geme, et al, Am. J. Respir. Crit. Care Med 154:5192-5196 (1996)). The third (XF1516) is similar to the uspA1 gene product of Moraxella catarrhalis (Cope, et al, J. Bacteriol 181:4026-4034 (1999)). All these proteins share the common C-terminal domain of the autotransporter family (Henderson, et al, Trends Microbiol 6:370-378 (1998)). Direct experimentation will be required to establish whether these adhesins promote binding to plant cell structures or components of the insect vector foregut, or both. Nevertheless, their presence in the X. fastidiosa genome adds to the increasing evidence for the generality of mechanisms of bacterial pathogenicity, irrespective of the host organism (Rahme, et al, Science 268:1899-1902 (1995)).

[0043] Three different hemagglutinin-like genes were also identified. Again, similar genes have not previously been identified in plant pathogens. These genes (XF2775, XF2196 and XF0889) are the largest in the genome and exhibit highest similarity to a Neisseria meningitidis putative secreted protein (Tettelin, et al, Science 287:1809-1815 (2000)).

[0044] Intervessel migration. Movement between individual xylem vessels is crucial to effective colonization by X. fastidiosa. For this to occur, degradation of the pit membrane of the xylem vessel is required. Of known pectolytic enzymes capable of this function, a polygalacturonase precursor and a cellulase were identified, although the former contains an authentic frameshift. These genes exhibited highest similarity to orthologues in Ralstonia solanaceaium, which causes wilt disease in tomatoes, and where the polygalacturonase genes are required for wild-type virulence.

[0045] Toxicity. Five hemolysin-like genes were identified. One is hemolysin III (XF0175) belonging to an uncharacterised protein family, and four others (XF0668, XF1011, XF2407 and XF2759) belong to the RTX toxin family that contains tandemly repeated glycine-rich nonapeptide motifs at the C-terminal domain. One of these ORFs is closely related to bacteriocin, an RTX toxin also present in the plant bacterium Rhizobium leguminosarum (Oresnik, et al, Appl. Environ., Microbiol 65:2833-2840 (1999)). RTX or RTX-like proteins are important virulence factors widely distributed among gram-negative pathogenic bacteria (Lally, et al, Trends Microbiol 7:356-361 (1999).

[0046] There are two Colicin V-like precursor proteins. Colicin V is an antibacterial polypeptide toxin produced by E. coli, acting against closely related sensitive bacteria (Havarstein, et al, Microbiology 140: 2383-2389 (1994). The precursors consist of 102-amino-acid-long peptides (XF0262, XF0263) that have the typical conserved leader 15-amino acid motif, and present some similarity with Colicin V from E. coli at the remaining C-terminal portion. The necessary apparatus for Colicin biosynthesis and secretion is also present. Interestingly, in E. coli most of the necessary genes for biogenesis and export of Colicin V are in a gene cluster present in a plasmid, whereas in X. fastidiosa these genes are dispersed in the chromosome.

[0047] Four genes that may function in polyketide biogenesis were found: polyketide synthase (PKS), pteridine-dependent deoxygenase, daunorubicin C-13 ketoreductase and a NonF-related protein. These genes belong to the synthesis pathways of frenolicin, rapamycin, daunorubicin and nonactin, respectively. These pathways include many more enzymes, which were not found. On the other hand, some of the genes listed lie close to ORFs without significant database matches, suggesting that at least one (as-yet undiscovered) polyketide pathway may be functional.

[0048] Prophages. Bacteriophages can mediate the evolution and transfer of virulence factors and occasional acquisition of new traits by the bacterial host. Since as much as 7% of the X. fastidiosa genome sequenced corresponds to dsDNA phage sequences, mostly from the Lambda group, it is suspected that this route may have been of particular importance for this bacterium. It is noteworthy that a very high percentage of phage-related sequences has also been detected in a second vascular-restricted plant pathogen, Spiroplasma citri (Ye, et al, Nucleic Acids Res 20:1554-1565 (1992)). Four regions were identified, which have a high density of ORFs homologous to phage sequences, that are considered to be prophages, in addition to isolated phage sequences dispersed throughout the genome. Two of these prophages, of about 42 kbp each, nominated as XfP1 and XfP2, are similar to each other, lie in opposite orientations in distinct regions and appear to belong to the dsDNA, tailed-phage group. Both appear to contained most of the genes responsible for particle assembly, although no reports of phage particle release from X. fastidiosa cultures are known to the inventors. In prophage XfP1, between tail genes V and W, two ORFs were found that are similar to ORF118 and vapA from the virulence-associated region of the animal pathogen Dichelobacter nodosus, which by homology encode a killer and a suppressor protein (Billington, et al, FEMS Microbiol Let. 145:147-156 (1996)). Interestingly, in prophage XfP2, also between tail genes V and W, two other ORFs were found that are similar to hypothetical ORFs of Ralstonia eutropha transposon Tn4371 (Merlin, et al, Plasmid 41:40-54 (1999)). The other two identified prophages, XfP3 and XfP4, are also similar in sequence to each other and to the H. influenzae cryptic prophage Φflu (Hendrix, et al, Proc. Natl. Acad. Sci USA 96:2192-2197 (1999)). They both contain a 14,317 bp-long exact repeat. Few particle-assembly genes were found in these regions, suggesting that these prophages are defective. An ORF similar to hicB from H. influenzae, a component of the major pilus gene cluster in some isolates, was found in XfP4.

[0049] The presence of virulence-associated genes from other organisms within the prophage sequences is strong evidence for a direct role for bacteriophage-mediated horizontal gene transfer in the definition of the bacterial phenotype.

[0050] Absence of avirulence genes. Phytopathogenic bacteria generally have a limited host range, often confined to members of a single species or genus. This specificity is defined by the products of the so-called avirulence (avr) genes present in the pathogen, which are injected directly into host cells, on infection, via a type III secretory system (Alfano, et al, J. Bacteriol 179:5655-5662 (1997); Galan, et al, Science 284:1322-1328 (1999); Young, et al, Proc. Natl. Acad. Sci USA 96:6456-6461 (1999)). BLAST (Altschul, et al, Nucl. Acids Res 25:3389-3402 (1997)) searches with all known avr and type III secretory system sequences failed to identify genes. encoding proteins with significant similarities in the genome of X. fastidiosa. Although the variability of avr genes amongst bacteria could account for this apparent lack, the high level of similarity of some components of the type III secretory system argues against this. We suspect that these genes are, in fact, not required due to the insect-mediated tranmission and vascular restriction of the bacterium that obviates the necessity of host cell infection. Furthermore, if the differing host ranges of X. fastidiosa are moleculary defined, this may be by a quite different mechanism not involving avr proteins.

TABLE 1
General features of the Xylella fastidiosa 9a5c genome.

| Main Chromosome | |
|---|---|
| Length (bp) | 2,679,305 |
| G + C ratio | 52.7% |
| Open Reading Frames (ORFs) | 2,782 |
| Coding region (as % of chromosome size) | 88.0% |
| Average ORF length | 799 bp |
| ORFs with functional assignment | 1,283 |
| ORFs with matches to conserved hypothetical | 310 |
| proteins | |
| ORFs without significant data base match | 1,083 |
| Ribosomal RNA operons | 2 |
| | (16SrRNA-Ala-TGC- |
| | tRNA-Ile-GAT-tRNA- |
| | 23SrRNA-5SrRNA) |
| tRNAs | 49 (46 different |
| | sequences corresponding |
| | to all 20 amino acids) |
| tmRNA | 1 |
| Plasmid pXF51 | |
| Length (bp) | 51,158 |
| G + C ratio | 49.6% |
| Open Reading Frames (ORFs) | 64 |
| Protein coding region (as % of plasmid size) | 86.9% |
| ORFs with functional assignment | 30 |
| ORFs with matches to conserved hypothetical | 8 |
| proteins | |
| ORFs without significant data base match | 24 |
| Plasmid pXF1.3 | |
| Length (bp) | 1,285 |
| G + C ratio | 55.6% |
| Open Reading Frames (ORFs) | 2 |
| ORFs with functional assignment | 1 |

[0051] TABLE 2
Largest families of paralogous genes.

| Family | Number of genes |
|---|---|
| (total number of families = 312) | (total number of genes = 853) |
| ATP-binding subunits of ABC transporters | 23 |
| reductases/dehydrogenases | 12 |
| two-component system, regulatory | 12 |
| proteins | |
| hypothetical proteins | 10 |
| transcriptional regulators | 9 |
| fimbrial proteins | 9 |
| two-component system, sensor proteins | 9 |

[0052] The foregoing disclosure sets forth various features of the invention which include, e.g., an isolated nucleic acid molecule, the nucleotide sequence of which is set forth at SEQ ID NO: 1, as well as smaller nucleic acid molecules, such as those whose nucleotide sequence consists of a nucleotide sequence defined by one of the arrows in FIG. 1. Such nucleotide sequences encode for specific Xyllela fastidiosa proteins, as set forth at, e.g., table 3. These proteins are also a part of the invention, as are degenerate sequences which encode the same protein.

[0053] Another aspect of the invention are computer readable media which have recorded thereon all or a part of the nucleotide sequence of SEQ ID NO: 1, or degenerate variants thereof. Exemplary of such computer readable media are floppy discs, hard discs, random access memory (RAM), read only memory (ROM), and CD-ROMs. Such computer readable media are useful, e.g., in identifying whether a nucleic acid molecule of interest is from, or is homologous to, a Xyllela fastidiosa nucleic acid molecule. Thus, they permit the skilled artisan to determine if a plant, plant part, or collection of plants, such as an orchard, are infected with Xyllela fastidiosa, or if an organism is potentially pathogenic to plants, based upon homology to X. fastidiosa.

[0054] Other aspects of the invention will be clear to the skilled artisan and need not be set forth herein.

[0055] The terms and expressions which have been employed herein are used as terms of description and not of limitation, and there is no intention in the use of such terms and expressions of excluding any equivalents of the features shown and described or portions thereof, it being recognized that various modifications are possible within the scope of the invention.

The application's sequence listing, which the Patent Office published only in electronic form, follows.

SEQUENCE LISTING (1 sequence)

SEQ ID NO: 1 - DNA, 2731748 bp, Xylella fastidiosa (residues 1-1,365,874 of 2,731,748)
ttttatgaatggctatatgaataactctgggaaaaatccgctcccaatgatagtctgatagtcaatttcatgatcccttgagctgctttcgcatcatcctcgcttttcaaagtgaaacagcccattactgatgacaacattgatggaatcttggtcccgttgcctggaacgtcttgaaactgaattcccgccagaagatgttcatacttggttaagacctttacaagccgaccaacgtggtgacagtgtcgtcctttacgcaccgaatccctttatcattgaattagtagaagagcgatacttaggacgtcttcgggaattgttatcctatttctcaggaatacgtgaagtagtccttgcaattggctcacgacctaaaacaacagaactacccgtaccagtagacactacaggacgtttgtcttcaacagtcccatttaacggaaatctcgacacacactataactttgataattttgttgagggacgaagcaatcaactcgctcgtgctgcagcttggcaagcggcacagaaaccgggagaccgtactcacaaccctctattgctctatggtgggactggtttgggtaaaacccatttaatgtttgctgcaggtaacgtaatgcggcaagtaaacccaacttataaagtaatgtatcttcgttcggaacagtttttcagcgccatgataagagcgctacaagataaaagtatggatcagtttaagcgtcagttccatcaaattgacgcgctattgattgatgacattcaattctttgctggaaaagatcgtactcaagaagaattctttcatacttttaatgctttattcgacgggaaacaacaaattattttaacatgtgatcgttatcctagagaggttaatggtctagaaccacgattaaaatctcgtttagcttggggactttccgtagcgatcgatcctcctgattttgaaaccagagctgcaattgtattagctaaagcacgtgaacgtggtgctacgattccagatgaagttgcattcttaattgcaaaaaaaatgcacagtaatgtccgtgacttagagggtgcattaaataccttagtagcacgtgcaaactttactgggagagctgtaactattgaattttcacaagaaactttaagagatttattgcgcgcacagcaacaaacaattggcatccctaatatccaaaagattgtagctgattattatggtttacagatcaaagatttactttcaaaacgccgtactcgttcattagcacgaccaagacaattggcaatggcattagctaaagagctgactgaacatagcttgcctgaaattggagacgcttttgctggtcgagatcatacaacagtgttacatgcttgccgtcaaatcaagttattgatggaaactgaaacgaaattgagagaagactgggataaactaatgcgaaaatttagtgaataactcccctacttttttatatgactactcattttctatagaaatgtaaaaataaattaattctttccaaggaagtgtaaaaaacttgtggataaaataagatttaaatttttataaaaatttatccacagattttccagatgatctaagcacaataacttaggatcttatacagagaaaaataacaaattaaacaacatcttagagcacttctccacaaaaaaatttctaccaccaccaccaccaccaccaccataagttttaaatattaactaaaaagcatagaggtaaggaacaaaatgcgtttcagattacagcgcgaaactttcctaaaaccattagctcacgttgtaaacgtagtggaacgccgtcaaacgcgttctatcttggctaatctcctaataaaagttaatgaagatcaattatccttaactggtacagatcttgaagttgagatgatttcaaaaacaataattgaagatgcggaaagcggggagattactatcccagcacgtaaaatttatgagatcgttagagctttaccggactctagtcaactaagtgtatatcaatccgatgataaaattaccctccaagctggtcgaagcagatttaccttagctacattaccagctaatgattttccatctatagataaaattgaagtaacggaacgtattattattcctgaagttttattaaaggaactcatcgagcgtactgcttttgcaatggcccaacaagatgtacgttattatttaaatggtttattgtttgatttacgagatactaaattacgttgtgtagctaccgatggtcatcgtttagcattgtgtgaaactgaattagaacaagctaaagatcttaaacgtcagattattttgccacgtaaaggtgtaatggaattacaacgcttattagaagggagtgatcgccaaattgagttggaaattgctcgtaaccacattcgaatgaaatcttttgatgtaacgtttacttcaaaattgattgatggttctttcccagattatgaaggagtgataccaatcggtgctgatcgtgaggtaaaggttgctcgtgaggttttacgtgatgctcttcaacgggcggcaattttatctaacgaaaaatatcgtggtgtgcgtattgaagtttcacccgggcagttaaaaattaatgcacataacccagagcaagaagaagcacaggaggaaattgaggcccaaactattgtggatggtttggcgattggttttaatgtgaattatctgttagatgctttatcttccttgcgtggtgattttgttaatattcagctacgtgattcaaattcttctgctttaatccgtgaatctaatagtgagaagtcacttcaagtagtgatgccattaagattatgatttttattcaacattaagaataaagtacgcctgataatcatcgggcgtttttttatggaacttaaattttatatttaattgttataataatgtgtggttttaatagtgtaggtaaactcacctttaaacgaactcttgttaagaatttatttctttattcgctatagattttaacgctatgttattattttttttctaatgatggaatcttagttgggtatgttattattttttatattctcatcattcttcctgatttcattaggtattttatctattgtgccagtgaattttgaatctgatgcacatcactcagctagtattacgtcattttcgttgttttgatgccgttgatttttttccattacctggactgaattttttcattggtgaaaatggttcaggtaagactagtttgcttgaagccgtacatttaatgggttacgggcgcagctttcgcggcagggtccgtgatggtttgatccgacatggctctgaaaatctagaaatttttgtggattggcaagaaactgatttaattaatgcacgtcgacgtcgtgcaggtttaagtcactacgggcaagaatggataggacgtttagatggtcaaaagataatgcatttggctactttatgtgctgcattggcagtgattacttttgaatcaagtagttaccaactcatcaacagtaacgccgaattacgacgtcggttcttggattggggattattccatgttgaaccagattttctggatttatggcgttgctatacacatgtgcttaaacaacgtaattctttacttaagcagaaagaagaattagcgatgttagaagcttgggatcaaaaattgagtgaagttggtgaacaattgactttccgtcggtttcaatatttggagagattgaaacaacgagtgatccctttaatttcaagaataacacctaatttaaaaatccatggtttaaattttaatcatggatggcgtcgtcacgaattgccgttgattgatgctttatttatttcgcgtgaacgtgattatcagtatggttatacttcattagggccgcatcgttcggattggactccgcaatttgctagtattcctggagttcatgttctatctcgtggacaaggaaaacttataacattgatgtgcttactagctcaggcgcaggacttttttgatcagcgtggggagtggcctattcttgctttggatgacttggcttcagaattggatcagaaacatcaatggcgcgtgttagagatgttagctgaaattccagctcaggtcttgatcacggggaccgaaattccccaaggactcaagccctatttctcagtgggtgctatgtttcacgtggaacatggtgctatcacgcgaatgttttgaagtgatttttagattgcattggttaccggtatttaattattttaaaagttccttaagttgagctgttgatattgaggtgcatcttctctgttgatgtattagttggagttattgggtgttttctatctttaagtgggttgtgaatttaatttacctatggaatgagctgcttaatagcatttaacctcattattatcatggtcttatatgctccccgtgttatccccgtgaatcataatagagtttgttatttcattggtctttgtcaggtaatgaaaagaaagaactcgaattaatctttctatacaattataggaagtgtgtgtgggatttattggatatagcagtccccaaagtgcctgattttgatgtttccttagtaagaaagcctgcttttcttggctttgagaagtatatggatagatatatttttaattttgtgatggaaattagcgccccgatgcgtctgaattttgaaatgattgacatggagccaatgaaaaacgcatgaccgaaaagcagaatacctcgctgctcagtaatggcggcatatatgactcaagtaaaatcacagtactacgtggactggatgctgttcgcaagcgtccagggatgtatatcggagatgtccatgacggtacaggtttgcaccacatggtgtttgaagttgtcgataactcggtggatgaggcattagctggtcatgccgatagcattcttgtcaagatccatgttgatgggtctgtctctgtttcggataacggtcgaggtatcccagtagatattcataaagaagagggtgtttctgccgctgaagtgatcctgacagttttacatgctggtggtaagttcgacgataacagctataaggtttctggtggtttgcatggggtaggagtttcagtggtcaacgccctttctgagcgattatggcttgatatttggcgtgatggttaccactaccaacaagaatatgttttgggtgagccgcaatatcctcttaagcagttaggggtgtcagcgaaacgcggtactacattacgttttaaaccggcaaaagagatcttcagtgatgtagagtttcattacgaaaatcttgcaaagcgcctccgtgagttatccttcctcaattccggccttcaagttagtttgattgatgaacgtggtgagggtcggcgtgacgattttcactatgaaggtggtattcgtagctttgtagaacatttggctcaattgaagaccccgttgcattcgaatgtaatttcggttactggtgagcacaacggcattgttgtggatgttgctttacagtggactgatgcctaccaagaaacaatgtattgttttacaaataacattccacaaaaagatggtggtacccaccttgctggcttccgtgctgcattgactcgtaccttgggtaattacattgagcagaatgggattgctaggcaagcgaagatcactttttctggtgatgatatgcgtgaaggtatgattgccgtgttatcggtaaaagtccctgaacctagtttttcttcacaaaccaaggaaaagttggtgagctcggatgtcaagccggcagtggaagctacctttggcttgcgtttggaggaattcttgcaagagaatcctaacgaagcacgtgcaattgctggaaagattgtcgatgctgctcgtgctcgcgaggctgctcgaaaagcccgtgatctaacccgtcgaaaaggtgtgcttgatatcgccggtttaccgggtaagttggcagattgccaagagaaagacccagcgatgtcagaattgtttatcgtcgaaggggattctgctggtggttctgcaaagcagggacgtaaccgaaaaaatcaggcagtattgccgctcaggggtaagattcttaatgttgaacgtgcacgcttcgaccgtatgctctctagtgctgaggttggcacattgatcacggcccttgggacaggcatcggtaaggacgaatataacccagataagctacgttaccatcgcatcatcattatgaccgatgctgatgtggatggttcgcatatccgtactttattgctgacgtttttctacaggcaaatgccagaattgattgaacgtggccatatctatattggcttgccgcccttgtacaagctaaagcagggtaagagtgagctgtacttaaaggacgatatcgcattaaatgtttatttagcgaatagcgcggttgaaggagcgcaattactccccgctgaaggtgaaccgcccattgagggtctggcattggagaaattgctgattacatatatcgctgccaaagatactatcgcgcgtcattcgcatcgctatgattctcgcctcctggaagcactgcttgaatttacccccttggattcgacttgctttcaatcctacagtgatagcgaacatctacagtcgctgatggcattgctgaaccagtccagcttgggtgctccgcgttatattctgaagatgcagttccctgatgagcaacatcctgccgccttgttggcgacccgctatcacatgggtgaggaattgactcaggtgttgcaattatcagcattagagactggcgagttacgtccactctatgaagcggccaagttgctgcacggcttaattcgtaacggcgctaaaattgttcgtggcactaaatcccaatcaattgagtgttttggtgatgcgcaagcttggttgcttgaagatgcgaagaaaggtcgccaaatccagcgctttaagggtttgggtgaaatgaatccagagcagctatgggatactacggtgaatccggacactcgccgtcttttgcaagtttgtattgaagatgggattgctgctgaccaaatcttcagcacactgatgggtgatgtggtagagccacgccgtggctttattgagaacaatgcattaaaagtgacccgcttggatatttaactttattacggacagttgcggttgttccatcagaaaacgatgctatgtctaatctgtttttatcagactctgtgccgactaaccgtgtcgcgcgtttgtcaactgtactgatcccttttagcattgatgtgctggtgagctgcatcacaatagcgttgatcagcattggtgcgatgctcctatgggagatagggagtggcgtgatgcttgcaacgcaggcacaacagcacaaccagaggctggattcgcagtcagtagctgttttgatcggtcagcctggtgtattcgtacaaatgttggtggcattgattgccattggggggacggcgttgttgttgtacttttggcgtctccctgccactgttgatgaacggcatcatgcgtgcttggcgttacgccgaatgtctacctggaattgcattgtcggtgttgctgccttaacttttttgttcagtatcctatctggattacttgctcgaaaattgggcattcccatcgtccctagtaaccaggcattgatattagaaggtttagcccgctggcctttgtttgtcgttttgttcgtcgtatttttggtgccagcctacgaggaattattgttccggcgtgtgtttttagggcgtttcttgattgctggtcgaccaatattagggatcactttaagtggtttagcctttgcctttttgcacgaaattccaggtttgagtagcaatggcgcgctggcgattatttacctctggttgatttacatgatcttaggtatggcttttggctgggtgtactggcgtactggaagtttgtgggcttcgattactactcattcttttaacaatattggtgcgcttattggactttatttctttgggatgtactaatttttacgaaacattaaatgcatttgaagaaacacttacagctcttataaagaatcgaggattgatgaaaaaactatcgtttttcttgatagcgacactatcgcttggcgcttgttcaaccgccacctctccgacgggtcggcatcaggtttttagtggtgtttcgcagcagcagcttaatcaactgggtgagcaggcgtttgttgagataaaggccaaggagaaaatcagtggcaatgtgcgtcagaatgcttatgtgcgttgcgtcgttgatgctttggttgcagaactgccgtcacagtggcgccaagtgaagtgggaaactatgctgtttgttaacgaggaaccgaatgcctttgccttacctggcgggaaagttggggtcaatactggaatcttccgtgcggcaaaaaatcaagaacaactcgctgctgtgctcggtcacgaaattggtcacgtcgtctcgcgtcatcatgaggagcgtattacttggcaacttggtactcaggccggtttaggattacttggtgtattggcaggtactgcgtatggagacagtgctgctactgcggttaaccagataggtgggctgactgctcaagctgcgtttttgttgcccggctcgcgtacccaggagcgtgaggccgatattgttgggcagcgcctcatggcccaggctggttttgatcctatccaagcggtttacctttggaagaatatgttggctattgcagggcagagaccgccgcagtggttgtccactcacccagatccgaccaatcgtattcgtcaattggagcagcaaagtacggtattagcatcggtttacgctcaggcacgtgacgctggacgtgtgccgcattgcagtcctgcagcatagaagaccaattgtcttctagtggaaattttctaatttcgaacagattcagcgtctgaattgatatataaatttctttctaatgacataaatcaacgaggtttgcgtgaaacgcttgaactacaaaaaggacctactgtctttacttatcctcatctttctaggcggtggtattgctgtgcctgctgcggcactacaatccgacaatacctctttgaatcatcatgctgctaagagaggtaattctgagaatctttatcctcaggctacacgtcaggaaccaaagattaaaaactcctcaagattggctagcgatttacagaaactaatagattcctataacaagggccaagattatcttgcggtacgtgcacaggccgatggaatcttagccaacacgagtgctaatgaagctgataaatcgttagctgcgcaacttggtgcacaggctgcttacaagctcgaagatttagtcgctgcgcagcattatttgaatcaagcgattgccttgaatggtttggacaataacaaccactatcaatcaatgctgctactggcccaattgcaattgcaggaaggtaaatattctgagggtttggaaacacttgataaatacttggctgaaaccaagtcacagcgcgctgaggatctgatcctcaaaggtcaagccttgtaccaatcaggtaagtactccgaagcgattccagttattaagcaagcaattgctgcttctactgaacctaaagaaagctgggaacagttattaatatctacctattctgaggttgggcagacaggtgaagctattgccatggctgagacattggccgctaaagcaccgaacgataagaaagcccagatcgatttggcgagtttgtacatgcaagctgaccaaatgggtaaagcggcagtggtgctggatcaactacgcaccgttggcaagcttaccgaagagcgtgaatacaagcagttatattcgatctatgcaaatactgacaacaaagaaaaggatgtgattaatgtcattaacgaaggaatgagcaaagggatcttaaaacccgattatcaaacctatcttgctttggcgcagtcttattactatacggatcagatcacccaagcgatagaaaattggaagaaagctgctccattatctaacgacggcgaaacatatctgaacttagccaaagtcttatttcaacatggccgccttgccgaagcccagcaagccgctcagaaagcgttgtctaaggggataaagaaaccagaagaagccaagaagatgatcaacatcaagtgattaccgcacgatggcttcccaagaaattctgtcagtctcttggaaagccatcctgagagcgtattgctgatgcgcgtaatcagtgatcttagtgtcgttgatgtttttaacctagctatattgctttatttatgattttatcgagtttctgctaaatgtaaacttactatttgaaatgcatgtaacgttgcgacaagttatcctgtctactattagcctctgaccattacaatctggtttttcgtttagagtgtgttgtttccaatcaattagcctccatggtttggcataattttttctcatgctatgggaaaagttaaaaacacatggtggtaagcgcggcgattggtataagcttagaagctgttgcggtgtcaatcactgcttgatttagggatcgctttcgcggtccgtgccttcactgttatagagcccattggcacatgtcggaagaacttattgtccataggtatgagcaggacgatgtgagcgatgctttaaattggcctcgtatccttggtattgcttttgtaatcgcattgcatcttgctgctttgatgctattactgattcccgctgcgtcactcaaggctccgcccgagaagcaacgccttgcggcggtaacaattgtggattccccgccaccaccgccaccgccaccgccaccgccacaggagaaaaaaccagcgccgcctatcaagactttggcaccaccgcgtcctgcgccagtccctcagccgccacaacctccagtggtggatgttcctcagcctcgtccaagcgatgttgttgtgccgcctgcgccgcctgcgccgccgactcctccgagcgacatcagtgccagcgtagatatttcgtcaaagaaaatgaaccccccgaagtatccgcctactgctttacgtgctggtatccaaggtgaggttgtgttgatcattgacgtagatgctgatggtaacgttactaatgtgtccgtcgagaaatctagccgtaatcgggatcttgatcgtgctgcaatagatgccgcttctaaatggaagtttaatccttcagtgatcaatggaaagaaatctgccggtcgtgtccgtgtaccggtcaatttttcactataggccataatactatggactggtccggccagtgcaggttatctgtgctcccttaaaacaccacgctttatcatcaacaacattaaaaggtaagtgtcatgttgcaggatcttttcatcgttgccacagcagggggttccaatccgtcgaatgccctttcaaaaatgggtgtttggcacctgattggcgaaatgaccgcgtcaccgatcgagtttgcagtttcctgggctgtgttgatcattctggtcactatgtcctctctttcttggtactggacagtcataaacatcttacgtgctttgcgcttgaagggcgcaggctacttggtcattaacgcgttttggaaggccaagaatccgcaagaagcaattagtgcgatggaaaagcaatcagcttccgaaccgttttccaagattgctttggatgctgcccaagcagcggcccatcatcagcggacagaaggtggtaatgcgatgggcttaggggaaaggctcagtctctccgagtttgtcgaccgtgcgttacgtcaagccgtcactcgtgaaagcagcaagctgcaatcagggatgacactgctggcgacggtgggcgcaactgctccattcgtaggtttgttgggtactgtgtggggtatttacaatgcgctaattactatcggtgctactggttcggcatccattgatgctgtcgctggcccggtaggggaggcgctgattatgactgccatcggattattcgttgcgatccctgccgtattcgctttcaacttcttctcgaagatcaatagttctacaatcgctaaattcgatacatttgcgcatgatctgcatgacttctttgctacgggttcgcgtgtacgatgatcctgtggtccgctttcataaagcaatcatcccaatgcgattagagggagtccgttatggcttttagtaatggaaatagcaatggtccgatggccgatatcaacgtcacgccacttgtggacgtgatgttggtgctgctgattatcttcatcattacggcaccgctgatgtctcataagattaaggtggaactgcctcaggctaatttggtcaagaagaacaatgaagaaaaacgctctaatccgattaccttagctgttaaagaagatgggtcgctttattggaatgacgcacaaatcagcgaaaatgaattggaacaacgtttttcggtcgctgcgcaacaaactccacaacctcctctcaacttacgtggtgatcgcaccactaagatgagtaagatcagcaagatcatcaaggtcgcccaagggcaagggattatggacattggttttattgcaactaaagaaaaggagcagtaagccatggcttttagtagcggtagcaaccgtggcccaatggcggatatcaatgtcactcctcttgtggatgtgatgttggttttattaattatcttcatcgtgactgcgccgatcatgacctatccaattgcagtggatttaccgcagccagtgctgaatccgccaccgatggatcatgaaccgccgccgccaattcaattgaagattgatgctagcaatcaagtctattggaacaacactctggttgcggttagccaattgcagcagcgtatggaggaagtagtgcagaaagatccaaccaaccaaccgcaattgcaaattgatgctaatccagactcagaatatgaagtgattgctaaagtcctagctgctgctaaaaacgcagatatgaagaagattggatttcatgagtaggtaaatcaattgcttttgcactacagcgcatggtttatccaatcgcgtaggatgtcactataagaacgccactttgtgtggcgttttcttttaatgtgttagacaaagcgcctctgttaccaaatgaatattcgttacgcattggatacatagatagaaatgtaaactcagcgcgcttgttgaatttattcgttgatggcctgaatacacaatacgctcctgtatggatgtgacatcgttgaacgtgttgaacgatgtcaaccacgaatattaaaggcagcttgtcacctgaaacatattttgcaataacaaaaataaaagaaaggaccagattcacaacagtgctctatctgttgcagcttgcctgcaccttcgttagttccttatcgaattagcgaatagcgctatccagaaaggtgattcccattccactcatgacacctggcatgacactatttaatggtgtgagatttgatgtatctacatgttgtttgatgacatcagacatctacgggatatatctgcagattggcgttgatggcattgaattctcgcatgcgagagtttgagtactgcctacagtgacgtcatgtccctgcttgagcagggagctgctattgagtgaatcgcttaatttttaagcaaccgctgccacttttgcactcaggaaaaccctcagcgagattccgacgctgttaggcttgctgttcttctgttatggctgcattgatcatgtcccggttgcttttcctgtccctatttctactggcttccagcgtattcgcccagacccccttcgcacctttgaccgtcgaacagatcatggccaaccccgattggatcggtccaggcatccgtactgcttggtggaagtgggatagcaaggaggtgcaatacgagttaaagcgtgaaaacagtccagtgcatgaaatttaccgccaaccgttgcgcagcaatacctcccaggttgtgagtaatgcgctgcttgccgatgtggatgcccctaatcctgtctatgaccagcagcgtcagcgcatgctatttgtgcgtcatggggatatcttcttacgcgatttgcgcaaaggcgtgttaatccagctgacccgcagtaaccagagcaaagaccgcccacagtttgcgacagatggtagcgttatctggcgcgctggtaacgattggtaccattggataccgcaaggtggtgtggcgcagctgacggacattcatgtcgggcatgatccagatgccactcctaaaaacgatccgctgcgtgatcggcagctagagcgtctagccacattacgtaacgatcgtgctgaacggcagacgctcaaactacaggaacacatatggcgtgccgcggatgcaacccgcccaacagatcctgtctatctaaatgaagacgtgtcgattgttgacagcagcttgtcacctgatgcaaggcatctcttgttggtgaccaaagcaaaaaacattgacgagggccagatcggaaagataccccattacgtcacagagtctggttatgaggaattccaagatgtacgtacccgagtgggccgcaacataccggcaccccagacactctggttaattgatctaaaggatggcactgcgcgtaagctgagtttctcgtcactaccgggtatcaacgaagaccccttagaagcgctgcgtaaagcgaatcgtaaagacccctttaaaggggaacgcccagtgcggattgagaccaatgccgatagcaatgtcccggcgattcactggactcaggatggtcgcaacgttgcggtggacattcgctccattgataacaaagatcgctggattgctgccgtcgacctgaaacaagcaacactcaatgtacgtcatcgccttcatgatagtgcttggattaactgggacttcaacgacttcggctggttaccagataaccgcaccttatggttgctgtcggaggaatccggttactcccacctttatacgattcaagaaacaggtacccccaaacagcgcacctttggtcattgggaggtgtccgccccacggttcagcgccgacggacgcagcgtctactttgtatgtaatccaacatggccaggtggttacgaagtgtgcaaactcgatttggacagcggccacttcgacaccctgaccgcattgcagggagtggaggacttcgatctctcccctgatggacgtcagatactggtgctttattccggctcttatttaccgccgcagttagcagtcatatcaaccaacggcggtcaagcgcgcgtgcttaccgatacacgtactagcaccttcaaagcaaagcagtggatccaaccggagtacgtccaaataccttctaaacacggtgctggtgtcatctggggcaaatactacggcccagcatcgttgcagccagaaaagcgctatccgatagtgatgttcgtccatggcgctggttatctgcagaatgtttccgcccgttatccctcttacttccgtgagcaaatgttccataccctgcttgtgcagaaaggctacatcgtgcttgatctggactaccgtgcctcagctggccacggccgtgattggcgcaccgcgatttaccgcaacatgggccatccagaattggaagactatctggacggcttggattggctggttgcccataagcagggcgaccggcgtcgcgctggtatgtatggtggatcttacggtggctttatgacctatatggccatgtttcgtgctcctggcacattcaaggctggagcggcattgcgtccggtgggtgattggatgcaatacaaccacgaatacacctccaatattctcaacactccggagttggatccagacgcgtatcagcgctcctcagcgatcaactacgctgaggcattgcagggtcatttgcttatcctgcacggcatgatagatgacaacgtcttttttaaagattccgttgacatggtacaaaagctgatcgagttgcgaaaagataactgggagatcgtcccatatcctctggagcgccacagtttcacccaccctgatgcatgggtggacgaatacaagcgcatccttaaattgttcgaaacacagttgaaacagtgaacctaatccgtcagatgctttaattccgctgcgggttattgttggagcgctcccatgtctactccttcttccgctcgtaccttcgtgaaagtcgtcgctttcatgtcccttggtttaggtgcattgagcttgttgaccagtctgctgtcgatcgtccacctcgaattgtttcctgatgaggagcatggaacgttgcagggcctatggggtgttcctatacctccccggctttcttgggtgttgagggataccctggaactctccttggccaatggggcgctgtcattactgtttatctgcgtcggttgcggactgctgtatcagcgtgaatgggcgcgacgtggaatcatggcgctgctgctgttcgtgacccttgttaacttttcttttttacctttgataggagttctattcgataccgtgatgaccttgctaacactggagatgatcgtcgcaccagaaaccaccacattgctgcatcaggcccggttaacgctccttggcgtcggtgtcgttgtcgcaatcgccgtagcggtattgaatggctggatgatttggcgctttcgggcaccggagatgcgcgctcagttccattgagtctgtagcctaagccgataccagtacagccactgcttccgtgtaattgaactgttctctcaaacagcgccgccgctgtactgtgatgtcatccatgtgttcgcttgcagcgtgggcgaaatgactggtgtgacggcataatcaccgtccagaccgcggtacatcccctctgttgtgtgtctggtgcgaccgcttcttttctttcaattcagactgccatgagcgatttcgaccgcgtccgcgattaccttactgccctacaagatcgcatttgcaatgtggtcgagaccattgatggtcaatcacattttcacgaagaccactggcagcgtacggaagggggcggtggacgtacccgtctcttgcgtgatggtgccgtcttcgaacaggcaggtattggcttctccgatgtctgcggtacacatttaccaccatcggccagcgtgcgccgtcctgaactggctggtgccaattggcgtgcctgtggcgtgtcactggtattccatcccaaaaatcctttcgtccctaccacgcatctcaatgtgcgctactttcgtgctgagcgtgatggaaaacaggttgctgcttggtttggcggtggttttgacctcaccccgttttatccctttgatgaagatgtcgtgcactggcacacagttgctcgtgacctatgcgccccatttggcgacgaacgttatgcagcgcataaacggtggtgtgacgaatacttcgtactgcgtcaccgcaatgaaacacgcggtgtgggcggcttattctttgatgaccttgataaggattttgagcgcgattttgcttaccagcgtgcggtaggggatggcttcctcgacgcttattttccgattgtgacgcgtcgtcatgacaccccctacggtgatcgcgagcgcgcgtttcagctgtatcgacgtggtcgctacgtagaattcaatttgttatttgatcgcggcacattattcggcttgcagagtggcgggcgtgctgaaagcatcttgatcagtctgccgccgttggtacgctgggaatatggttaccaccctttaccaggcagtgccgaagcgcgtttggctgactatctgttgccacgtgactggctgaatgaaagtcgcatttgcgaatgatgtctggactctgtccattcccctgagaatgatcgtgatcctagcgtcctccttcgctgatacagcatcgtccctaacctcatcatccacagagcaaaccatcatccattgcctagctagcccttggatgcgcttctggtgaatcctacacctggtgtacctcgctgaggatgttgcgcggaccctcataaagcaggcaggcaacactacgggttgagttgccaatattagtcgaagtatcagcttaaggctgatgatggcacatggaatcgctcctacttatttccctgctgattgaacgatccttcctgtgttccgttctgcgatgttattgcaggtgcaaggcttcaatcagcacaacgtggctccgatgaaacaagatggcggttgcagtcattccaccggccatctttctatgcaacatgatccggtgcaatagtcgttgcgctctgcccatacagtggctacacgcaatcagacagaacatggtcgatctgattacaaagatcttcaggtcgtcatcatcttgtctgcacagatacacgtgatgaagaagccaggatacatattgctgattgctgattgctgattgctgattgctgattgctgattgctgattgctgattgctgattgctgattgctgattgctgattgctgatgatgttatgccgcccgtttaaatgcttggggtaaatcccggtgtatcgcctgcgttgttgcacgtgtagcgcgatgcctaggacacggcttgatccatgcttaatcctatggcctaggagattgcagtgattcttgctcggatatttaaaaccgaaagagcaacgaaacgtggaggtgtgtcgctgattattggaatgcaagcgcaacattgccaaatcctttttcttgataagcgaagaattgcagcatgcttatcagctacgccaatcaatccataacatggcggtatgcatccaaggtgcagttttaacgtgacctgttgttgtctgaattctatgtgcggtttgagcgcgtcgtatcgtgcggtgagacgccaggatgtagcaatattcctcgctcaccgttttgcacgattggcactaccgcttcattgaggccaccatcttttagtcaatgaagcggctattgttgcgttgctttctgctgattcaattgttgagtcagtgcaacagcaatcactccgcgctcgaagtcatgcagcagcgcggtatgagcgatctgaccgcgttgacgatgcagcacacaatgatggaaaagattccccagaacgagaattgccatggggactcaccgcgcgtgcgcagcacgatgccgccttagcggcacactttcagagatgcagtgttgatcgctgctctcagaaaaagcgacacttcctcgcagtggtgcagaccacgtctagtgggcaggctgggatggcgtgtttgcttcggaatgcccccgccgagcaatagggtgcgctttttcagtgctagcgtcatcgtcccatcatgtcgtgtcgtttccgatgggttacggagtgtggtgccacagctgctgtttgccgatcaaaaagggcatgtcaccagcgatcacatgatgcgtgtgtcattgtctctcttcaaggcagtcggacacattgttgggcaacggcaacgctgtgatcacaggagcgtattcctgttgaccggcatcgttacggctcttctggcgttgcagggcgtggtatgggtggcggagatttttcgctaattcggtgctttattgagattgttcaagtgggtcaacctatgtgctgtgctgtgctgtgctgtgctgtgctgtgctgtgctgtgctgtgctgtgctcgtgtccctgtgtgacgctaggttaggagccttaaagagagttgttattcatccatgctgcgtttttatcttgttgaggttgtaggccttttgcttgagcaaagtgtcaagttgagtgacggcgtctgatagtaaaagttgtatgcaactatcagttagaagttgcttgggcacatggctacgctgccttctagcatctgtctcgttttgtaggtggtcttcagatcatccaatcagttttaatgagcgttctgctggcagtatcaggttgatgtatatggcttgagtaaagcattcatcgttcgtcttgaaccgcgcgctggtcttggtaaatggatgttctacctaggggttcggtatttgatttttagagtaaaaaatactggcgtccgaaagacggttggtacttttaagaagtgctccagccataggagagcaataaggtgtgcaagacaccgtttgatctatgtgctgtcgagtgtgatatgcctcgtcactttgggttgccattgtgcagtgatggtgtgtgtctttgccaagcttgccgtagaaccatgtccggtattgaagaggggcgctggaatgggggtgtgctgcaatcagatcattccgtcgttcaggtagttttgattgcgacggaatgcagcaaacgcttgggaaaattggtgtaattgggatgtggtatcagtgattttcaatctgggtatttcgatctcaatgctggtgcgtgcatgacggaaccaaggaatctgtggtcacggcggtaagcagcgttttctttatcctttttttgtaacagatggttgtgcctaggtctcatttccaggcaatgagcattcaaagtaagccggttaatttgaggcaacagtgaggtttaaaaatggcaaggcattgcctttttctgttgagtgcgatgcgcttggcttgaagtatccagtgtcagtcaggaaggggttggaagcccgagttatagacaacggtttttcagcgctaaaaaggcgttctgacgatgatgatgatcgggtctagtgatagtagttacacagactatttgttgtatgaaacgatcatctttaagtgtttggtgggcccagcaggacttgaacctgcaaccaacggattatgagtccgctgctctaaccaattgagctataggcccttaatttttttaggggcgtcatagtgatcgccccggatgaattctacttcgctggctattttaaccaatggcgtgacagttttttctatttccggccggtgttctagtgtggtggttcatgtggttatccaggggtcctattgccctggtgtcatacgtcatgagagtctcgctaaggtgtgttgtacttatcatgatggtatgtcattgagtcatctatcgattgagctattcagtgtactggtgattacgcatgttggccgctatctgttttttttattattcttttaggatagtaatttacgacattattttgttagggaagcgcaaaaattgctgcatctgatatgagctaaattaagaaaaaatgatgtttcagaaccttagcatagtcttgggatatcttgggacgttgggtttctttacgatggttttcagagctaggtgttgaagtcatttcttaatatcttttctgcctcgttactcaagggagcatgtggaccatatgtttctatagtgaaaagcatgttcaatctcattctgggtctactggatatcggcatcttttaagaacatctattgcagcaagccccaatgagtgggtggcataacatcatttgctggcatcggaatgtatagattggaacaatctggatgttctaaggctaatgacacacggtgctgatgtggctggatgctgggacatataaatgtttgatttttaggtgtcgatgacagaaaagttagtttaagaaagctggaaaaaaatgcgcgtgatacgcgctgttattgggtttttgatgttttgttagttgtagcggtcgttggtagagtctgtctgacgcgtacggcctgagcgagctgctctaacattgcgaccgaggtatcccagtcgatgcaagcatcggtaatgctctgtccataggtaagtgtgtttccaaggactaattcttgccgaccaccaacaatgtggctttcaatcatgacaccgacgatgcggcgttcaccggcttcaagctgttctacgatgttctcgatcaccttgggttgattgtttgggtttttgccgctattggcatggctcgcatcaatcatcagtcgcaccggtagcttggatttaagcaatgtttggctggcagcttcgacattgattgcgtcgtaattcgggaccctgcctccacgtagaatcacgtgacaatcggggttaccctgggtggcgacgactgcggcaacacctgtctttgtcactgaaaggaaatggtgcggatgcgaagctgctttaatcgcgtcagcagcaattttcacatcaccactggtactgtttttaaagccaatcgggcacgataaacctgaagccatttcacggtgtatttggctctcagtggtgcgtgcaccaatggcaccccaggcgactaagtcagccagatattgcggcgaaatcgtgtctagaaattccacaccagcgggtaagccgagatgattgatatcgcgtagcaggttgcgcgcgatatgcaggcccttattgatttggaagctgccatcaagatccggatcgttgaccaatcctttccaaccaatggtggtgcgcggtttctgaaagtaaacccgcatcacgatctctagtgcatccttgtacatctcacgcaatgggtgtagacgttgcgcgtaatcaatggctgcaattggatcatggattgagcatgggcctatcacgacggctaaacggtcgttgtggccgtgcaggatatcgtgcagtgcgttgcgtgaggtcgcaacagtcagcgatgcctgctcatcgcatggtagttgcaataggagctggttaggaggtgtcagtggttcaattttgcggatacggaggtcgtcggtaaatggtggcatgggatgtaatctcagaacatttagacatagaccaagcggaggagacaataaaaaagccgccaaacacattggcggctttcgaggatgcgggtgaagtttccttcagagagtacgcagcccttgcttcgccaatggtattgaagaagcgtagtaccaaaaataaaaaacgttgcaattaaagcgcatgaattcattaatagcacgctcatacgacatctaccactgtttcattcgtaactctattttaggtagcaaggataccaagagaatttgaattcaaatgataatcgcttggtgcgtattactcaggccatcagcatcagtatcccgatgcaacaatatgtgtatgaagagcacctattgtttggtgtgagaacgatatgagtgaagtttgtgcagcaatggaaggtagtagatctatggctgttacgatggtcctataagtcacacgagtacggtgtgatgcgttccatacagctgtccctatatctcctggatgttcatgttttgaatggttaaaacgtccatctttaaatgatggaagggaccttgcaaaaaggtcgaatagaagaggcaaagtctttattagttgttttccatcagtaaatgaaaggtgttgatgaccggatgtggtcgaatgtccgtaagagcgactctatattttcataaaaatattttctctaatagcgatcagagcaaatgtattgaggtaacgggtttattgtttgagcaacaatcaatgctgcaactcgtccaagatcagatccctatacagcaggagtcagactgcgcagcagcccatgcagtgctgacctgaaatgtcgatcaggtattgctcatcagattctattgacatgcgtataacgcgaatacgtgaagatagttcctacattgccgagtcatcaatgatggaagaagaacgaaggaggtctcaaaggaaagctaggcggtctggatttagtggaagtgaaccaccagcactcgttcaagcccttgtcttggacggtatccacgggctgttgcagcatcatttaacactgcatattggttttttggagtgctgtgtagacacgtttttatcaatagttgtaattgcacgtaaaaatttaattgatctgtattgtgaaataattgtgatataaatccaattttttcgggcgtagtatagaaagatgacccaaaggaagttgaccccacatgcgcctgcgtatggtttcagcacggtggaattaatggtgacaattgccatcctggcaattcttgcgggccttgcttatcccagctttatgaatctgattaatggtgagcgcttgaccagcagtgccaacgagttagttgcttctttgcaacttgccaggacagaagcaatccgccttggttctcccgttactgtgtgtcgcagtgatgatggcatcacttgtcgtactgggggcccttggcaacgctgggtcaccgtggccaagggcaggaacaacatcatcagggtaaacgatgcgatacccaacgttactgtgcaaggcagcccgagaatcacccgtttaagcgaccaaattgtattcagcccggatgggctggcgcgtgacgttagcggcgcattgctgacagcgcaattgtcgctatgtatgcccaacacccggatggctaacaaccttcgttttgtcagcatcaatggcggcagccggatccgcgtctctcccggagccacagccccatgtactcagcctaacgatgaataaaacactgctatgtccatcgcaagtaaaaaagccattgccggcattagtttgatcgaagtgttgatttcggtatttattcttgccgtcggcatgctaggcattgcggcaatgcaagtcatggcgctacgcaacaatgatagtgccctgcagcgtagccatgcagtgattcagtcgtacgcgattcttgaagcaatgcgcgccaatcgcagcgaagcgatcaaaggcagttacaacaccaatggaatggtttgtactgcgccgcaagcgaacagcctggtcgatgttgatcgtcgtgattggataagcaaccttaaggcggcactaggtgattctgaacacacctgtggctcgatctcttgtgatgccaatgcatgcacaatccaggtgcaatgggacgagactcgtgcgagtgataaaaggtccccagccggtcagcttgtctcttccacgcagactcaagtctttgaagtgaggagtaaactgtgaatcaccagtttgccctgaaacgcttccagcgtggtttcaatctgattgaattgatgatcacattgcttctcggcctgctggtcgtcctcgctgccatttcaatgtttatatccagtcgtcggctttatacgacgacggagaatatgagccgcctccaggagtcggcgcgtgtggcgtttgaactgatggcacgtgatctacgcgaggccggtggtaatgcctgcgacaacaccctacccgttgttaatgtactcagagattccgccacagaatggtcgcgtaattggagcgtacctctcatcggttttgatggcggtaccctgactcaaggcgtcagaggaacagacgcaatccgcattctgtctgccgggaccagcggaggtacagttaaaagtcacgatccggtaaacaatacaatgaccctttatacgcaagccgctgacttgcataccaacgggatcatgatggtgtgcgatcctcagcagctttcaatattccaggccagtaacgttgctggaaccacagtcagttatggcaatggtgcattgaattcctgcacttactttggtcgtttgccatcagtgtgcaatgcgaatccacccaattatcagcaccaagccaattcgatcatcactgaattgcgtgcagtgcagtggtatgtcagaacgaatgagcgtggcggaacctccctttttcaggagattcgcggcccgaatggtgtgagcgcattgggcgaagtggctgaatctatcagtgcgatgcaaattacgtacttgttaagaggtgctacaagttatgtcagcgctgctcaagtatcggaatggaaaaatgtcattgcggttagagttgccttgacgatccagacgaccgacagagtgggtgttgataacaacgtcgtgtcacgcaccctcacctccgtcaccagcttacggaacagaaatttatgaggatgactcacctcggtccgtacagacagcgtggcatctctttaattgtcatattactgctgctgctggtaatgacgttgattggtttagctgttctgcgcacgacgttacttcaagaacgtatgagcgctaacctccgtgatcgcagtttgagttttcaagctgcagaagcagcgcttcgcgatgctgaggagttcatcaatacagagaatgctaaaggaaaagtagccgggttcaattgtacggcagcgggaagccaatgtccggcgattccggagaatacttatactggaaatctatcatctgggtgtagcagcggcaccgaaaattgttgggtcaatgctactggcagccaagcagtcacccgcatgattggacagtattacatccaatacctaggagaacgcgccggcgtcaaccaagagtcattgggttcaggttccagcgctagccaaagtcaatatggcgctgccgaggaaacctcatcggaaaagtattaccgcatcctagcgcgcagcagcgatccgactggaaaagatgaacgcgcctttgttgtcctgcaaacggctgtcatcattaattaattggattttttcaagacatcgaaatgaaaaagactgtgtttaatgtggccttgaatcgggcggtggcggtattgatcggcacactcgcaggtatcagtggtgcggtacatgcgggcgtggagatctcccaatccccattgcatgttggtaaggatgtgcctggtaacctttccattcttgcgtctgtcgagtttcccacggtgatcagcgtggctaacctggccgacacctacagttcagccgttaggtatgtcgggtatttcgattccaacaagtgctacaaataccactacagcaaccaggagagtgatcgttacttctatcccgttgcctctccaaggcctcaagccaattacggttgcaacaccgcaggcggggtgtgggctgggaattttctgaattgggccgccacccagaccattgatccgttccgctctgcattgacgggtggctatcgcgtgcgcgacacgaccaacgagaccattctagaaaaagcagtgatggatcgtgattctcaggaaaatttcccgcgccgcgttgttcaagatcgcagtctgctcgccgcttcagtgcctgggcagtgggacaaattccgtatccgcattgacggtctcggcaacaggatgcggtttactcaggcgacccgcggcctcttcagtttctggcaagagccgttggagacagaggggcaagcttataatccttccaaacacccattaaaccgcaatgataatggtgtttacgaagtgagtgtccgagtcaaagtgtgcgatgcatcggttggtctggagtccaactgtgtagcctatcccagcgactattacaaacccgaggggctgatccaggcatattctgatcgcattcggtacagcgtctttggctacaaaaatgaccacagttacttgattgatggtggtgtcctgcgtgctcgccagaagtttgttggaccccaaacccactatccggaacaagggaagaaaaccaatccccatgccgaatgggatccgcaaactggcgtcctctatggcaaccctaatcctgaggatgctgcggcgactacccagcgcgtaggccgtaccattggtaattccggcgtcatcaactatttgaacaagttcggtcaaatggagacgggtagggctttaaagatttacgatcctgtcagtgagctttactacgcggcattccgctattttaaaggcttaggtaatgttcccgaatattcggcattgagcggttcggcgaatgaaaagtatcagcaggccgatgcgtttccggtgattactgactggggggatccgattcgctatgcctgccagagcaatgttgtgctgggaatcggcgatacccacactaatcaggataagaatctgcctggtaataccaactcaatggaagagcctgccaaaccccaagcggtcaaaaatgatagaagcgttgacgtggtcaagcgcatgacgcagatattccagatggagggcatgagtcaaagggatgcgatggcggcggccgtggcacctaaattcaattttcacagatacaactcagcctatattgccgccctggcctacgatgcccataccaaggacatgcgccctgatcttgaaggggatcagttgctgacgacacattgggtcgatgtggtggaggcgggagattacaaaagtccaatatcaaccaaccaatactggttggccgcgaaatatggcggatttcaagtgcctgccggttacgatccggataagacagttaaacccctgtctgaggagacttggtggaccaacggcgagtacgtcaataacgatcttaaggccaatgccaagcgggcggacaatttctacgttgccgccgacgcggaaaagatggtggccagcctcaaacaggccttctcacgcatcgttgccgagaccaagggggctgggacgggactgtctagcaacagcgctagacttgaaaccggtgcggttacctatcaggcacaatttttcagtggcacctggcgtggtgatctgatcgcctatcacgtggataaagtgaccggcgcgctcaccccattttggaacgccaacttcccggcatgggaacagcgtgttatcacgtttgctaatggcaccacactgcaagacttcaccaaaaaaaatctaggcgaaaccgcgctggcatcggcgagtgcgcagcagattaattacctgcgtggtgatcgcagccaggaaggcaatgtgccaggcaaactccgcatccgtagcggcatcatgggagatattgtcaactcccaaccgctctatgtcggtgcccccaatggacggctgtacacaaccgcgagcttcaccggggcgagcgcctatgccgcgttcgtcgcccagcaggccaaccgtgccccggtggtttacgtgggtgccaatgacggcatgttgcatgcctttgatgccaatactggtaaagaaatatttgcatttgtgcctcgcgcggccatgcccaaattgctggagtacaccgatcagaactacgtacaccagtactacgtggatggtgaactgaccgccgctgatatttacgataccaaatcggggtggcgctcggtgctggtggggacgttgggtcgaggcggcaaaggtctgtttgccttggatgtgaccgacccttccaatattcgtttgctgtgggacaaaacgtccgcggagattggcggcttggggaatacattgagcaaaccgatgattgtgcagacctccgatggcacctggtcggtattgcttggcaatggtcccaacagcactgcggataacgcgcaactgatcgtgatgaatctgttgaccggtcatgccactcaagtggttgttagtaaggcttcaagcaatggattgtctggtgtgctgccctggtccagccagagcaacggcattacggatcgcgtgtacgccggggacctgctgggcacgttgtggcgctttacttttagcgataacgcttggaaggtggccccgctgttcactgccacgtatcaggggaaggcacagccgatcagcgcaacaccactgggggccattgagcgctccacggggcgcatgtggatcttctttgggactgggcgtgtgctgtcttcgcatgatatggataacaaggaggtacagagctggtatggcctgattgaccagggaacgacgattcctgggcgtaccgggctgagccaggtacagattgttgatgagggtgtagtcaatgggtatgccgtgcgtacggtttctgatcctaagaatataggtactgatggctggtatatggatctgatttcgccgaaatccggtaagcagggagaacggatgattgtgtccaacatgttccgtggagcggcgttgatcgggaccactcgtattccggataacagcgacatttgcaagctcagcggcagtgggtttgtcatggcgatcaacccattcactggtggccggttgggtcaatggttttttgatctcaacactggtggtggcagtggtggcagtggtggcagtggtggcagtggtggtagtggtggtgtgttgaatggtaatccagtgtctggtgtgggtgtgagcagtgcgccgaatagcccggtatttaccggcaatatcatgcaaataggagcagatgacggtacggttacgtcgttgaagacgccctccagcggaggcctcaatataaaccgtgtgtcatggcgtgaaatcttgaggactgagtaacgatgttcgtgaatgatgtaacttccatgattaaaaacaaaaaacaaaacggcttcactttgatagaagtgatgattgtggtggtgatcgtggctatcttggcagcggttgctatgaccagctaccaagggagcattctcagaacccgtcgctcagcggctcaagcctgcttacaacaacaagcgcaatttatagagcgttattacacaacccatatgacgtaccttggggcggaccagtccgcaccaacatgcgatcccagcgctaatcttgataacttttaccgtttcgctgtagctgcgcaggcaagcacgttcatgctgacagcaactccccagggagcacaggctggggatcgctgtggcacgctcacgctttcaaacactggggagcgcaccccgcgtgttgacggttgttggtgaggtttggagtgcttgggcagtattacatccagcattgaggagcgcgggagtgtgcaccggggacaaccaagaggcaatcaagaagcgctgtgtgctgcttccagcgccagccaaaatcacgatgtcgctaccgaagaaatgtcctcggacaaggaggatcgtatccctcgcccgcagtagcgatccatctggaagagagaggcgcacgttcgttgttctaatcagcggctttcatcatcaaccaatgggatttccccgaagatcggcatcaaagcacggattgaaatttagtacgcagtaggtatatatgtgcacggttgcgcagtgctgtgctgtgattgaagcaagagccgattgctcacagcatgcggtgaacgtgttgcttctttaagaccgtaggcgtggatggcaacacgtttgcgtagggcatggcgtcagattttatgttgatggctcagtgagtgccgtcatgatttctgtttgcatagcctctgctgccgcttgcggatcctctgccattcggattgggcgtcccaccacaatcgcatctgcaccgttggcaaaagcagccgtgatgctcatcgtgcgttgttggtcattgtgaggcacatggtttgtgcgaatgcctggacaaacgattgagaatccagagccgacggcgcggcggattgctgctgcttcctgtccagaagcaatcacaccactcatccccgccatgtgggcggctaatgcacgttcaatcacgacatcaacgggttcgcggtcgatacccatcttcgctaaatctgcacgtgtcatggatgtcagcacggtgactgccagtaaatgcatgttgctggtattggcttcggtcgccgcttgcatcatgggcgcgtgccagccatggattgtgcaatagctgatgggccactgcgaaagacgacggatgactcctgcgactgtagcggggatgtcgaagaatttcaggtcgacgaagacgcgtttgccacacgaagccaagtcgtcgagtacctggaaatattcgccggaagccaacaattccatgccgatcttatagaaggagatggcatcacccaatcggtcgatccattccaatgcttgcgtccgactgggtacgtctagtgcgaagatcaaccgctcgcggatccccagtaataacggcgtgtgattcatcatggtcgatccaatgtgaaatgtttctctgcatcataaaaccgatcttgcccggttgctgttggtgtggaaccaggctatctgtcaattgtcgctattaacgttcaactgcatttacaagggtattttgaatcggtggctatggtgctgcatccgtatgctttcctgttgcgtctatttaaaaatgtggccgagtgtagcaataaataaatacgtgatcagtgtgattgaacagcatttttttattgctttagatagtgctgttgtagcagcacgttgtgagtgtgactgcttttgattctgatcgaaaatgaaatcattacatctgaaaaatcatttttgttgagccggaaacaggtccgccacaatcgctggaagtcaccattcaatgacggaatgtattactcgcagcattgaataaaaattcgatggattcagtcatcactatgcaaaaaactagtattcgaatgctggtgtctatgcgctgcaatcatcagcagaatcatcaattgatagccacctgattacggaactttaaaaacattttgaacccccgtgctccagatcatgctgtttaagaatgacgctggtgcagtgactgtgtgattacattatgtttttacttccggtggaaaatgatctgtgtcgtcagctgtcgatgatgttccgtgactgcgtgcattgattctacccgccaataaggtgatgtcagtggtgccaatgtatcttggaatgagcgattgcagttaaatattatgtgccgatttaacgggcgtcactgcattcttggagcatctcagttgtttagaatgtctcttgcgtcgtgagtgggaagatccgagtattcacgctgagcagtgtcgtgggcagattgagcgtctccaaatgattgatgcgggtactgtctactttggcgtctgactaagggcaagccacaggattaatgcggtttttatggatttttatgcctgttaaagaattcaaacttgaggctgggagggccttgggtgatgtttgttagatagaaactagccttgctgccttgttacgatgcaaccgtttgggcgtactgcgtaactgtgcgggggcctaagtattttctccttcgttttcagtgagtacccatcgtgcccttatttacagatgtggaattggttccaggtgatcccattctgagcctcaacgatacttataacgccgatacacgtaccaacaaggtcaatttgggtattggcatttattgtgacgagagcggttgtatcccgctgttgcgggctgtccagcaggttgaagagcaacttgcgaagcatccgaaaccgcgcggttatctgccgattgatggtttgccagcctatatcaaagccacacaacaattgttgtttggagtcgactcccccttgttgacggctggccgtgtggcgacctcacagactattggaggttctggggcattgcgggtgactgctgaggtactgaagcaggtgctaccacatgccactgtggccattagccgtccaagctgggagaaccaccgtgctttgttcaccgctgctggcttcaagattgaggactatacctatttcgatacgctcggccacgcggtggactttactggaatggtggcggacttggcgaagctgcaaccaaagaccgtggtattacttcatggttgctgtcataacccaacgggtgccgatctcagcagggatcagtggaagcagcttgttgccttgttccaggaacgtcaattgctgccatgtattgatctggcttaccaaggattcaatcagggcattgatgcggatgcttatgccatacgtttgcttgccgaagaaggtattagtaactatgtagttgccaactcgtactccaaatcgttctcgttgtatggcgagcgtgttggggggctgtcgatcgttgcttccaatacggagcaagcccaagcaatccagtcacaagtaaagcgtattatccgtacgatttattccagtccgtcggcacacggcgcctacttggtcgcaggtgtgctcaacagtcatgagctgcggacgctgtgggagcaggagttaacccagatgcgtgaacgtatccacgggttgcgtgcgggtttggttgctcgattgacggcgctgggtgcgccggagtttgatttcatacaacgtcaagcaggcatgttttcgtattcggggctgagcaagatccaggtggatcgtttgcgcgacgagttcgggatttatgcggtcagtagtggacgtatctgtgtggctgcgttgagtcagcacaaattggaatacgtggcgcaggctgtggtgaaggtgcatcaaggctgagatgtggttctgttttccggaacagtaggtgcctgcatcaagtcgtattagagtcagacatcggcgcgttacatcatggatggtgtctgctgaagcgccattatcggtaggcgtgtctatcaatgtcgtggttttgtatcgttggcaacatcgttcatttgattttgcggcaaaagttccactcagtgacgactacgtggtgcgtcgcacatgacgtatgcaattgcaatcaaggtgcgatgtcagcatattgcgatttacgctgtttaaggcgttattgctggattggcgaacacatcaaagtgattgccccctttctcgatgaaccaagggcaggtcactgcgtgcgtggtgatcgctcccgcatcctgatccggaatctccttgtccgcatgttggactgccaagcggtgacaggatgagagccatcttcagggcatgacattcaccgtggtgctggtgagcgagtgttaaatacatagatggggcttgcgtgcagcgtgtttcgtacttagcttattgagtggatgtctgctaagtaacgatgaaatgcgggctgattgcgttgcgctgtgctgccgcatgcttccagtcaatggcatcagtaatgtgctgatgtgtccgattgcgttgcagtggcaaaggtgtaatccgcgaagatgtggccgcgcaagtacccgacagcatcaatcgtgtgttaatagcggttatgacatgcggtatcagaagagacgcaatagcactccaggtacctgagggtgcctggagtgcatgtgttctgtacagaacattattttttacagcgattcatacgttttacggatcgtgtggctttgcgacactacggcagcagcagaagcgatgctttttagaattattttttcagcgaatcgcgaatctcgcgtagtagtagcacatcttcgctaggtgtttctggtggtaagggttgcttgttaatcaccttattaatcattttgacgatgatgaaaattgcgaaagcaatgatgatgaattgtaggatcgtgttgaggaagtcaccgtagccaatcacgacggctggcacctctttccctgctgcatccactgtcgcagctttcaaggtgagggagagcttggagaagtcgatccctccgaccatcacaccgatgagtggtgaaataattttatcaaccagtgcggtaacgatttttccgaatgctgcaccaatcaccaccgctacggcgaggtcaatgacgttgccacgcattacaaattctttaaattcgcggataaaactcacatttaactccttatctcctcgcggtcgtatcgccgcatgtggtgcatcgtagcgtgttgtcgatcaaagcaggatttatgttgttctctgtctaggcttggtttctatccgttgcaggaagtatcctgagcagctaaggctacttcaagtagatgcagttatgaggtgaggtccaaccgtcatcgtgatgttttccaggaaattaaggtcacatagggtgattttgcaacgtatctttgcagcgtatcagatcgagaaaactcgttgagccaggtcaaaatactcgttgatctgtgttcgatttgtgttcaatacacgccatattatttttcagcacggttatcactgtagtaggcccgctgatagttcttgattttcccgtttgaattctggggaaggatggtttttttattgccgtgcgtcttttgacaccttgcggtcatcggaatctttgtaatgttttggagccagatatttaagaacgtccgctcgtttagttcctttagaacaacatggtgtgttgctgcaagacatcgacgcaacactgtttgggtgctgatgtgctctggtacagcggtgactggctgttgtcccactactgtactgtggggtgtgctggattccgctgtatcgatggcaagctttggattgaccgctgctggtgagcgatgactcatacggtcgacgtgtgatctttacgtgcagcggtgttgggatcgatcatggcaaagttatggccagttctatgcaacggtgtggatcctgtgtgttgttgcagtcaatgttccaaagagaggcgccgtcattgaactcattgggcaggtggattgcagtaatagagttgcgctagcaattggtctgtttgagagcggcaacgcacgatcgttgtttcttgatggcctaggactgttgccaatggcggaatatggaattgtttggttcgctgatgatgtgttgtgacacggtaaggagtagtgatgacactgacggctattcaactaatcggcgcgcttctattcgccgttgccattttgcacacgtttgcgacgaagttctttgagcgtttgagccatagccatccgacacatgctgggttgtggcatttactcggtgaagttgaggtggtgtttggtttctgggcgttggtgttggttgtggcgatgtgtgtcacggatggggcgcaggcagcgattcaatacatagattcgcgcaactttactgagccaatgtttgtgtttgcgatcatggttgttgcgggcactcgcccgattttgcataccgtgttggctggggtgcatctgttgacgcggtgggtgccgctgccaggcaggatggggttttatttcaccgtgctgaccttcataccgttgcttgggtcgttcatcacggaaccggcagcgatgacgcttgctgcactgatgctctcgcagggtgtctttgcgaataagattccgccctatctgaagtacgccacgctcggggtactgttggtcaatatttctattggtggcaccttaacagcgttcggggcaccgccggtgttgatggttgccgccaaatggcaatgggacaacagttttatgctgcaaacgttcgggtggaaagcagtgctggcgatctttagcaacgctttgggggcaacgttgttattgcgcaacgtattgcggcaccttcccgagacacaaggcgataccgcaggtgaggcggtgccggttatcttgcgggtgatccatcttttgttgctcattggcattgtttggtttgcccattatccggttgtgttcatcgggttgtttttgttctttctgggtgtggctcacgcgtatgagggttaccaggatcgtttgattctgcgtgaggggcttttggttgcattgtttttggcaggactggtgatattgggtgggcagcagcagtggtggttacaaccggtgttgctcggcatgacgagtgatcaagtgtttttcggtgcggcaatacttacggcgtttacagacaatgcagcgctgacgtatctcggttctttggtcgcagggctttccgatgggttcaaatacgcgttggttgctggtgcggtcacagggggtgggttaacgatcatggcgaatgcacccaatccggcggggattgcgattttgcgcgggcactttaagggggcgtctgtgcatccactgggattgttgttggctgctgtgccgcccacggtcattgctgccttggcattcagatacctgtgacacggtggctgttgagaagctcagggtacatctcatccaggcggcgcaggggtgttgctcttctgtcgttttgagagggatgtctaggtggaaggggagcaagatcggttccggtcacgcgggaggcgcaggttaggaggcgtatatagccgttcacctggcgtagtccgtacactgttcggatgaactacagtcacgccttccacgcgggtaaccatgccgatgttctcaaacatattgttttgctggcgttgctggatggtctagcacgaaaggagacgccgttctttgtgcttgattctcatgccggtcgtggacgttacctgctttctgccggggagggtcgcaataccagggaggctgagtctggagtgatgcgactcatagcccatccgcagtgtttggaggtgattaagcgctatgtggatgtagtgcaggcggacaatgtttcacagacacgggctgcaagcactcctctgcatatcagcagttatcctggttcatccctgctggctgcgcaggtgtgccgtgcacaagatcggatggtgttttgtgagttgcatcccaaggaggccgcggcactgaacgcattgttcgtacatgatcccagggtgcgtgtgcatgcgggggatggttatgcagcggtgcgtgcgtttttacctcccaaggtggggacgcagaggattgggcgtggcttggtatttatcgatccgccctacgaggcacaggatgcggagtatccgttgatccttggtgcgctgcgcgagacgttgacgcgctggccgcaggcggtttgtgcagtgtggtaccccatcaagcaacggcggcgtttgcagcctttcttcaggaaggcggggggattgccggtacgctcggtgttgatcgctgagttgctggtgcggcctgatgattcgccgctacgtttgaatggcagtggcatgttattgcttaatgcgccctggcaattcgatcagctcttggctcctgcattgccagtgttgaaaacccaacttggcgaatccggcgcacgtattcggttggagtggctcaaggtgccgcagtgagtgccgctgttgtggtgaggtgtttggggttgtttcaagtggatgtctggtgcttagcgatgatgcatttgcgttactgttgtcaggttcaagggcctagtcgatgtgatggcctgcgtgcacgctaaagtatgtgtttgaaaaatatcgccctaagaataggcggttttttttgtgatttttgccgcatttcttgttttgtgtctcgatggcacacttttttgcagtatgttttttgcagggggtgagggagtgaaatacgctttccaggcagttatgcaatgatggttgagtttaggagccattgtgtttgaggtgtttactaaaggcttgtatcgcttagcttcatcaggtcactttaagtcgacattgcgcaagtactctctttaaatggatcgattgatgatttttttcattcggagtgtcctgtagttgaggtatttcctgtccggatcaatcagtgacacaaaatacataataagttttaacgatagctcaagattgcaatgtggatatgttcccgttcaccgctgaccagtgtggtgatgccagaatctggacattatttctggtcactatttaaaagaagataacgtcatgtccgtccgcaatcgtatgccaccttggcatgagaactttaagctgccgaatggtcatgtgttgctgttgcgtcctgtccgccctgaagatgtcgaacctttgcagggggtatttgcgttgatggggccccaagaaatccgtgagaggtttgcaccgtctgcgaccggttcaagtgaacgcttccaacaactgaccaatcccaatgctaagcgtgagatcgtgctggtcgcagccgagccgttgccaccgggagaggccatgattgccgcgctggcgcgtgccgcaatcgtacccaattcgcgtcatgctgagtacattgttctggtcagcagtttcgtgagtggccaggggttgggtcgacagttgctgcgtaaattggtgaagtgggcacgtggcaagtatctcgatcatctctatggcgacatattggagcgcaacaggccaatgttggaattggccgagtcattgggtttccaacgtgagtctcatccggagtccccagatttggtgcgtatgacattgaaactgtatggttgattgatcggtgagtgacggtccaaccgggcactcctgaggcaggctctgctaaaatcaacggttaatcatgtcgccatcttcctttcccgctccgctgctgccccgtgccgggcagctccgtgcattttggcgtgctccggtctctccaacggcgcttgcttggcatatcgcctgtgctgctgaggcacacagaggaccgttgctgttggtcacgcatgacaatcacagtgcgcaccaggttgaggttgacctacagactctattggtgcattgcccagagttgccggtcattggtttcccggattgggagacgcttccttacgaccaattcagcccggatccgaatattgtcagccagcgtttggcgacgttgcatcggttgccttcattagcacgcggtattgtcgtcgtgccggtacagacgttgatgcagcagttggcaccgttgagttacatcgttggtggcagctttgattttaaggtggggcaacgcttggttctggatgctgagaagcagcggttggagcgggcgggttaccgcaatgtgccgcaggtgatggaccccggggattttacggtgcgtggggggctgcttgatgtttatccgatgggtacggatgtaccgctgcgaatcgaactattggatgaggagattgattcaatccgtacgttcgatcccgaatcgcagcgttcgttaaatcaggtcgatgtcgttcatatgctgcccggtcgcgaagtgccgttggatcctgcggtgcttgaacgcgttttagtgcggttgcgtgagcgtttcgatctggatactcggcgcagtgcgttgtatcaggatttgaaagccgggttagctccctctgggatcgagtactatttgccgcttttttttgagtcggggcgtggtgggaaacacgcgaccgcgacgctttttgattatttgagttcggatgtattggtgttaacagcactgggggtctctaacgctgccgatgcgttctgggcgcagacgatgcagcgttatgagcaacgttgccacgatatcgagcgcccgttgttaccgccgcaggagctataccagtccccggatgcgttgcgtgaacgcttgaaccgtttgccgcgcattgaggtttggtcggtcgaacatgcgcatatcgataaagcagaggcattggatgaacagccattgccggtggcgactaaggatgcttccgttggacaggcactgagagctttccttgctgattacgctggccgtgtgttgattgccgctacgtcgcctggtcgtcgtgaggtgctgcttgaattgctggccaccgccgatctgcaaccggaggtattgcctgactttaggtcgttttttctctctgtgctcgaagtgcgtgatctgagggaagccaatcgcgatagtggcaatggcgtgtcaggtgcgaatgatgcggctgcttttcacgtcattgcttcgcagggcgggtccttgccaacgttcgcgatcactgtggctccgttggaggatgggttttctctcagtgtgccgcctattgcggtgcttaccgaacgtcaattgttcccggagcgggttaatccggtgcgccgcagtcggcgtgttgggcgtgagccagaggcaattattcgtgatctgggtgagttgtccgagggtgcgcccatcgtgcacgaggaccacggggtcggtcgttaccgcaaactgatcaccatgaacgtcagtggtatgcctggtgagtttgtggagatcgagtatgcaaagggggaccgtttatacgttccggttgcccaattgcatctgattagccgctactcaggcgcttcgccggagacagcgccgctgcactcgttgggtggtgagcaatggagcaaggccaagcgcaaggcggccgaaaaggtacgcgatgtggctgcggagttgttggaaattcaggcgcggcgtcaggcgcgtgcaggcttggctttgcgcattgatcgtacgatgtatgaaccttttgcagcaggtttcccattcgaagagactcccgatcagcttgcagcgattgagacgacgctgcgtgatctgcaatccagtcagccgatggaccgggtagtgtgcggtgatgttggttttggcaaaacggaggtggcggtgcgtgctgcattcgctgcagccagtgcaggaaaacaggttgcggtattggtgccgacgacgttgctagccgaacagcactatcgaaatttccgcgatcgctttgccgattatccgattagagtggaagtgctgtcgcgcttcaaaagcactaaagaaatcaaggccgagttgcagaaggtcagtgaaggcaccatggatgtcattgtcggcacccatcggctgttgcaaccggacgtcaagttcaaagacttgggtttagtcattgtcgacgaggaacagcgtttcggggtgcgtcagaaggaggcgctgaagtcgttacgtgcgaatgtgcatttgttgacgctgacagctacgcccatcccgcgcacgctcaatatggcaatggcggggttgcgtgatttgtcgatcattgcgacaccaccgctgaatcggctggcggtgcagacgtttatcactccttgggataatgcgctgttgcatgaggctttccagcgtgaactagcgcgtggtggtcagttgtactttctacataacgatgtggagagtatcggcaggatgcagcgtgatctggcccaactggtgccggaagcgcgtattggtattgcccacggccagatgcctgaacgcgagttagagcgtgtcatgctggatttccagaagcagcacttcaatgtgttgctgtcgacgacgattatcgaatccggtattgatattcccaacgctaacaccatcatcatcaaccgcgctgaccgctttggtttggcgcagttgcaccagttgcgtggccgtgtcggtcgttctcaccatcgcgcctatgcttatttggtggttcctgaccggcgcagcatgacggcggatgcagagaaacgcttggaggcgattgcgtcaatggacgagttgggtgcgggctttactttggcgacccatgatctggaaatacgcggcgctggtgagttgctcggtgaggatcaaagcgggcagatggccgaggtcggcttcagcttatataccgagttgcttgagcgcgcggtgcgcagcatcaagcaaggtaaactgccagatcttgatgcaggtcaggaagaacgtggcacggaggtggatttgcacatacccacgttgatcccagaggattatttgcccgatgtgcatacccgtttgacattctacaaacggatttccacggcccgtgacagcaatgcgctgcgtgagttgaatgtggaaatgattgaccgttttggtgtgcttccagacgctgctaaacatctgtttgcaatcgctgagttgaagttgcaagccactgcattgggtatttccaagttggaattgggggaaaatggtggccgtatcatgtttggagccaaacccatcattgatcctatggcggtgatccagctcgtccaaaagcaatccaaactgtattcgatggaggggccaagtaaattaaaactcaagttgcctttgccggaaccggccgatcgcttcaacgctgcacgagggttgctggctgcgttgacaccttaatgttttgtcgcgtttccaaggcaaccggaagactaaagagcaactgtatccgggagcgattgaagggtgggcatgggatggcgcaaacaataaatggtaaaaaactgtgattgtagaatgaggggtgtcgtgtctcttatcggtcttggcatctgtgatggtgatgaaatatctagaagcatcgagctttatatgaagattgtctagaaggtgaagggccatcgctaaatacagcgatgaccggcggcgtattgcgcatgacacccactcaaatgatatgcaggtgtgctgcgaagatgcttgaatgcttgatccgatccgtgcagaccggcaattgcatgcaatactgccttgctttggcgagattcctgaatcgatcaatgactatagggagtatgactgtgaggggcataggaagcattcacgttgtatagataccatcggtgcttccttttgttccgaagattcagtgagagatgtatcgttagaggacagcgccgcatcatctatcagcagatttcgaacctacataccttggcccatctggacactatcactgtcttcgcgcagactcgccgccttgaggcttttagggtattgagtgcccttggattccaatagcatggctcatttgctgctgttacatggtcctaatttgaatttgcttggtacccgtgaacctgagatctacggtcgtatcacgttgccgcagattgatgcggccttagccgaacgcgccacggctgctggtcacggactgagtagtttgcagtcgaatgccgagcatgtgttgattgaacgtattcatgccacgccggaggatggcactgcgtttatcttgataaatcctggggcgtttacccatacctcagtggcgttacgtgatgcgctgcttgcagtagcgctcccgttcgtcgaaattcacctttctaacccgtatacacgtgagccgttccgtcatcacagctatctggctgacaaagcattgggcgtggtgtgtggttttggggtggacagttaccgtattgctctggagggagtgattgccagactcggctctgacgtctgagtcggcgatcagcgctccgtatccttactgtttttctattctgtattaccaatgaggccgttatggatctccgaaaaatcaagaaactcatcgacctgttagaagaatcgaatctttccgagatcgagattaaagaaggcgaagagagtgtacgtttggcgcgtacctccaacgccggtatgaacataatggcaccaacgatgccgtgggtaccgtctgtagcaaatgtaccggcggcaccggcgatgccgatgatgtcgcccacagatgcttctaccggcggtatccctaaagatgatggggcgcttccggaggggcatgtgctgcgcgcaccgatggtcggcacgttttatacctcaccggcgccggataagccggtgtttgtgagtgttggtcaaacgattaagcaaggtgacaccctggccatcattgaggcaatgaaaatgtttaacccgattgaggccgatgtcgccggcacgatcgtggcgattcttggcgagaacggtcagccggtcgagtttgaccaaccgctgtttgtgatccgctgagccatccaccaggcgttggccgttgccttaaggacgccgtacttcggaacctttctcatgttagacaaagtcgttattgccaaccgtggtgagatcgcgttgcgtattcttcgcgcatgccacacgttgggtatccgcacggttgcggttcactctaccgttgatcgcaatctgaagcatgtcgcgatggctgatgagtcggtgtgcattggctctgcaccctctgcggagagttatctcaatatcccggcgctgattgccgctgctgaggtcacggatgctcaggccatccaccctggctatggttttttgtcggaaaacgctagttttgctgaacgtgtggaacagtctggtttcattttcattgggccacgggcagagacgattcgtttaatgggcgacaaggtgcaggcgatccatgcgatgaaagcggctggtgtgccgtgtgtccctggttcggatggtccattgggtgatgacattgtcgctaacgtcaaaattgcacgtgagatcggttatccggtcatcattaaggctgccggcggcggcggtggacgtgggatgcgtgtggtacataccgaggtcggtttaaaggcggctatcgagaccacgcagtctgaagctaaagccgcttttggcaatggccaggtgtatatggaaaagtttctggagaatccgcgtcacgtggagattcaggtgctcgccgatggtcaggggaacgcgatccatttgggggagcgggattgttcgatgcaacgccgccatcagaaggtggtggaggaagcccccgcacccggtatcactgaggcgttgcgcaatgaaatcggtcaagtgtgtgtagatgcctgtattcgtatcggttaccgcggtgccgggacgtttgaatttctgttcgagaatggtcgtttttacttcatcgagatgaatacgcgcatccaggtagagcatccggtgacggagcgtatcactggtattgacttggtatgcgagcagttgcgtattgccgctggtcagccattgagtatcaagcagagcgatgtggtgttgcgtggccatgcgatcgaatgccgtatcaatgctgaggatgctgagacgtttttgcccaatccgggtttgattactgcgttccatccaccaggtggtccgggtgtgcgtatggatacgcatatctacagtggttacaaggtgccgccgaactatgattcgatgatcggcaagctcatcgtgcatggtccggaccgtgagacggcgattgcgcgcatgcatttggcgctgagcgaaatggttgtggatgggatcaagaccaatatcccattgcagcagcgcattatgtgcgataagggtttccagttcggtggacagaacatccattatttggagaagtgtttggcggagcgtaagaaccaaacgatcgggcggacctgagaagcagcggtgatcgcgcgggatgtacccagcagaaattcgatgcggaaacgggctttagaatgaatggagcactctcccaacgtcgatacgatgttgggggagacaaagtccatgacgtcggtatgcactgttgcagtgagatatgagaggcacagcgcagtggtgatgcctgtctataccacgctgagtttggcgtatgccatgaccaaccattttgtgccgacgtcatcgaatttgatttgtacgcgggtgtgcgcgccgctgccttcgtagtcgacgaccacgccgcacccaaatgtagggtgcatgacgttcacgccgagcttgataggtgctgcgtcgcgttcatcatgggctggacgctgcactgctcctaatggggtctggcgtgagacttgtatggtagggcgtacttcatgcaatagatcccgcgggatctcgcgtaaaaagcgtgaggggatgttgtagttatctttaccgtggatacgccgtgcttcggcatagctgaggatgagtttgtgacgggcacgggtgataccgacatacgctaagcggcgttcttcctccagtcgaccgtgttcatccagggaacgcgcgctggggaataatccattttccaagcccaccaagaagaccagggggaattccaagcctttggctgagtgtagggtcatcagttgtacgccttcctccccggcctggacttgaccatcgccactttccaggcatgtataggataggaacgcgtccaattcggtcatgatgggcgtgtcttcgtcgttttgcggaaggacaaaacgtgaagcgaccgaaacaagttcgtctaagttttcttgacgtgattcggcatccagagaaccacgcgcttctttcttccagtgctcgcgtaactccgaacgcagcagcatatggtcaatccgttcggctaaacccatctggctggtttccaccgcaagttgttgcagtaaattgaggaaactcgccaaggcattacgtgcgcgcgcggtcagcgtggttgattgggtacatgccattgccgcatcccatagtgctaagccttgggtacgtgctaggtgtcttacttcatctaaggtgcgctcaccgatgccgcgtacgggggtatttacaacgcgttcgaacgcagcatcatcgctacgattggcaagcagacgcagataggctagggcatccttgatttcggcacgctcgaagaagcgcatgccgccgtaaacacggtaggggatatgttcggattgcagtacttcttcaaacgcgcgggactgtgcgttactacggtaaagcactgcgatttcgccgtagctgccgccgtcgcgtacccactggcaggcgcgttcgacgatgtagcgggcttcatcaatctcgttgtaggcggcgtataggtcgatggattcaccaacaccggattcagtccagaggcgtttcccaatccggtctgggttatgggcaatgattgcgttggcagcgtcaaggatattggcgctggagcggtaattttgctccaagcggatggtctgcacgtttggaaaatctttcaggaagtgttgtacatgctcaactttggcgccgcgccagccgtagatggcttggtcgtcatcgccgacggcgatgacgtggccagtctcattggcaaggatgcgcacaaacgcgtactggatggcgttggtatcttggaattcgtcgatcaggatctcacggaagcgcgaacggtagtgtgtcagcagtgcaggagtatcgcgtagcagttcatgtgcccgcagcagcagttccgcaaaatcgaccaaaccagcgcggttacagcgctcttgatactcggcatagatgcggcgctgcgtctcgatccaatcgtcgtgtgactcgggctggatgtgctcggggcggcgtccttcatctttctgtgtattaatccaccacatcgcctgtttgggggggaagagggtgtcattcaatcccaaggactggatcactcgtttgacgaggcgtaattgatcgtcgctgtctatgacctggaagttttcgggtaatgttgcgtcgttccaatgcaggcgcagtaagcgatgcgccaggctatggaaggttccgatccacatgccgcgtttgccgtggcgcagttgtagatcaatccgttgttgtatttcgccggcggccttgttcgtgaaggtgacggccatcatgctgtgggtgggtactccatgtacctcgttgagccaaacgatgcgatgagtgagaacgcgggtttttcctgatccggcaccagcgaggatcaggtagtggccgggagccgcagcaacggcctcgcgctggttctgatttaagtgatcaagcacatgagagacgttcacgcaatgattctacgtggtggcgggatgatcttcatgctaagtgtctgggcatttgggggtgcattgaggagagtcatgctggaactatcgtcactgatacgcaggacatctccgtaggtgtgaagagggggagtggaatggtaatgccttctgcgtttccaggcttcatccatgatctaaatgaataacccagcgcacattcagaacactggtttggtaataaagggattggggtggcctatcagtggaaatggggttgtaaggaagtaatgaatgtctaggatgaaggtgttccgccgcgtaggaagtgtgcttgatctgtttcatattggatttattgtgttcatgccaactcaaatagggtgtgagtgtgtggtgtattagtggtgttatatcgtttctgtgatcggtgaattgatttggaaaggttggaaatcatgttcacgtgtgtgtgagtgtgtgagtgtgtgagtgtgtgagtgtgtgagtgtgtgagtgtgtgagtgtgtgagtgtgtgagtgtgtgagtgtgtgagtgtgtgagtgtgtgagtgtgtgagtgtgtgagtgtgtgagtgtgtgagtgtgtgagtgtgtgagtgtgtgagtgtgtgagtgtgtgagtgtgtgagtgtgtgagtgtgtgagtgtgtgagtgtgtgagtgtgtgagtgtgtgagtgtgtgagtgtgtgagtgtgtgagtgtgtgagtgtgtgagtgtgtgagtgtgtgagtggtgatgtccgaatacaaaggaaagattgtctttagtgattgaaatggtaggcatgctttgtttcgtgtttccgatgacgaagactgctgagggtgagtgatgcttaaagcaagcgcgtgattgggtaagtagatatcgcttgaagatatctatgtgatccgtagagagggttgccacacaagtcagtggcactgtatgagtaagctccgtcaatgcgcatcgctgacatgagaaatgcgatgtctatggatgagatacgtgtgatgtgcgcgtgcgattggataggaatgccatgcgaggtgtcatggatgattccggtgtcatggtgatcgtggtgtgggacgattttattaaatagtaaatttaatcaatgaattaaaaaacatgatgcgtgtgataatctattgatggataaggtatttgtgattccctatcatgttctccaagaggagcgctcagattggagtgaagtttgtattgcttgattcagtgggaatcaatatttccatctttcaaattctggataaaccgttatttttatttctggtatatcaatggtttctagtacttcatgatctttacatagcgtttttctgatgttatgagtatcgaggtgtatacacctcacggggctgcttgggtgtctgatgagtgcttgtgcaggtaatacgtgttcgatcattgataaaacatcatccaggtatattttttcagatgttttgatagggtgtgtaaataaaaataatttaaatgaattttgaatgaggggcgatgtatcatcattcgcggcattcaagaactcatgtcgaaggaattaatagatgtctgcatcattttcgccacatacaattacacttataaaatctacagtgccattattggccgaacatggcacaaccatcatcgaagccatgtaccatcgattgttcgaagatccgcagattgaagcgctgttcaatcaggcaaaccagaagaacggcactcaaatccatgcacttgctggagcgatactggcgtacgctcgcaatattgataacccaggtgtgcttgcatcagcgattgaaagaatcgcacaaaagcatgttggttatgcaatccatccagaacattatcctcatgtcgcaaccgctttactgggtgcgattaaaaaagtcttgggtgacgttgccacatcagaagtgttggaagcctggggagaagcgtattggtttattgcaaatcttttaaaagatcgggaagcagtgattcgtgaggggatcatgaccaagaacggtgggtggatccactggcggcgttttgtcatttccaagcgtattcctgaaagtgaaacgattacttcgtttatgctgcatcctgaggatggtgggccggttgtcccccatcaggccggacaatatcttacgttccgtttcgatgcagccggcatgccgggtatgaaacgcaattactctatttcctgtggtcccaatagcgaccattatcggattaccgttaaacgtgaacacggcacaggggcatcggctttcctacacgatcaagcgaaagttggaacgattatcgaatgtacgccgcctgtgggtgattttttccttcccagtgtgattgaaaggccaatcgttcttttatctggtggtgtcggattaacaccaatggtgagcatgatggagcagatcgctgaagcgcatcctgatgcgcaggtatggtatgtccatggtactcagaatcgagaaacacatgcgatggatgctcatattcgcgctttagtgagtcggcacaagcatatgaaagccacgacgttctatacacaacgtcgtgaagccgatgatgcggaagccgggtttatcaccattgattggttgcgagccaatacaccgtttcaaaaggccgatttttacctttgtggcccgcgtcccttcttgcgcacttttgttcgtgatctgatcggtgctggtgtgccagcagtacaggttcattatgaatttttcggtccgatggatgaagaaatggccgcataatggtgtgatcctactagataaattcaaggcattgcattgtttcatatcgtctattatttctattaatgaatgcgcggaaaaaattccattgttgtcgtagatatgcaagatgaagctgattattccatcgtattttcttggatctgagcggcaagaggaatgccgagttgttgtgatgggtcgacgaagaagtatttaatatcgcagcgtgtaaaaccatgttggattggttctgagtgacggtcatcgtattgatgatgaggatgtatagtgcttcagagttttgatttgtacattcgtcaggtttatttggtgtgccgttgactgcgataaaaagttgttcaaacggcatcaccttgttgactaaccgatgtgctctcattggttgtgatgcttatccaggctcagctttcttatcaaaacaaaaagtgaggtatcaacgaaggggaggtagtatgcagatatgattgcaacaaaacattgttgatggtgcgatatcgtcagaacgattcggatttggagattttctttgtggtgcggttgtggccgaggcgatagatattgagcttatatgagtggatcaaatgttcctgcattacattttttggaagaggagcttggatttattgaatggttggttgagtttcgtatgttcatatcttcttctaatttatagcaagtcaagacaatgaggggagcataagatcattgcttggtgctagtaccatgaaaactggaacctcggcggaaacattctatttttttgaaaaactctccactttgttttcattagaagaaaatatcaaagaaacgttgaagagtgattgtggtattgatgcactgggtgaatgtgcatttttcattgagcgcgttgtcttgtaatgcgttatgccaattgctaaattaactctcagagagagcatgattactgcagatgccgaaaatatgacaggctattacgctgattggctgcattgaatctggagtatcaatgtgcgcactgtgttgtaaggttttatgtcaatgaaaataaattatggcatattgattcaatggatagatataaacggcattgaggttaattagtaggaagtgttctcagtattatatttaagcgttataaaatatgatcgaacacggatcaagctcatgagtgttgttatctgttatctgttatctgttatctgttatctgttatctgttatctgttatctgttatctgttatctgttatctgttatctgttatctgttatctgttatctgttatctgttatctgttatctgttatctgttatctgttatctatgtcttggggtagcgataagggggtaagagagacagtcttactattgcgtgttccgcgtaatgaaacaccgtaaaaaagagatctgcagtttgcaacgctctataggcagtgtttgactacatcgaatgcgcatcaatagcagaaatacaactcactcgctgagagataatccagatccattaatacatcaatatgattgattgatatgcgatgcaatagaaacgcttgcatactgacttgaagttcccatctcaaagttcgccgtggccagctagcatcgcgtcataagacgattggctatctgtataggggatagggagactccatctgtttctagaatatcttgaaggtggatccatttgcgatctagtactgtgtcagtcggatgatgctcatctagtggctttagcttgcttgatcgttgtcattattgttggtacgggtggttaaggtgtcgacattaggagcaagaggataggtctgaatgagatcaacgttgtgcgttgtctttctgttgggagcgggcatacaaacgaaccagtgagtggctacactgtgtcgattcgatagggagatagcaatgcattgggtgcttttattgttggccattgctgcgatgggtgttgcctttttcataccgcagatgtggctgctgttggtgacacttttcggtgcgctgggcttgttgttgttttggacgtgtgtgcaatattccaaggagtatcgtcgccgcaaccacgacattagaagtatggttgatgaagttgaattacagaggttgcaggaattggctgcagttcgcaggttatctcctgttgttgggggtaatgatgatgtcggtggaataaataaatgagtcagcgtactcggttgagtgtcaacgttaataagattgcagtcttacgtaactcccgtggtgacggtgcacccgatgtgatacgtgcagctagtgcctgcattgatgcaggtgcgcacggtattacggtgcatccgcgtcctgatgcacgtcatatccgccatgatgatgtgatcgggttatcggctttgactcgtgcacgcggtgtggaattcaacatcgaaggtaatccgtttgcagagccacgcgcaggttattgtgggcttctggcactttgccgtgaaacccgccctcatcaggtcactttggttcccgatggggatcagcagataacatccgatcacggtttcgattttgcacgggaaggtcctgggctgcgtccattgattgatgaaatcaaacagtggggatgtcgcgtgagtctatttgttgacgttaacgtcaccggtctggctgatgcagcaatatggggtgtggatcggattgaactgtatacggggccgtatgcggagatgcatcatgcgggttgttcggatgcggtgttgcgtgaatttgctactacggcacgtcttgcgcaggatgtcggcttgggtgtcaatgctggccatgacttgtcgcaaacgaatcttggtgtgtttttaggggctgtccctgatgtgttggaggtttcgattggtcacgcactgatcagtgaggcgttatatgagggattagtgccaacagtgcgccgttacttggatattctagattcggtcaatcctgctgtttctatgcgttgatgttgtttcggagtctatgaggtctatgggattttgtggtgacctcaaggcatgtcagtaggtgtgacgctgcaggcgggtattcatcatgatgtgttgtgtgatctgctttgctttgtcgatgttatgtagcgagggatgtttgaaatcaagcgtcgctatattgaggagttgtgggtttcattaggcatggaggtgcggtgataggcgattcattttgagtctttccattgcaagattttctattgaatgcgatagaagcatgagaggatgaggtggtgttgtgtacgtattgacgttattttttctttatttgaataaagttttacggatacattcagtgaaagtcgatagagtggttttcatgaagataattttcgctgtgagtgcttcaaactcatttgaggtggaacgtatgttaggaggcatctcggattgatttaatcatttcattaaatacacgatatgttgtatctcccctttgagattgttcattttgaattggcaagtgaagccaatacatggcgggtacgaaacaatgctgcttgtgcttgtacgacattttggagtacatcaccgagtgcgctgatgacatcttgacgttggtgtaggatcttggaaagtgcgctgacctcggtacaaagtgtttccatttgcttggccgctaatgcaacaagttgtgctgcatcgggggggagaggtgcagaggcaacggtggccggtttctcttgattggagatgttttgtaggtgtgtttctccttcttggaaatcagttttggattcttgcatgcgagaatcagtcgtggcgttcttttcatttgtcgttggcttggcattttgtaatttttcacggactgttttacgcatattgatcccaggatcgactttggcttgatcgataatcgtttttgctgcagtttgattgaccttttcaagtcgatataggtcgttgatggccgtaatatcagcggtgatgccttcggaaacagcttgactggtgaggctgttggtctctactacttcgagaaagttgatgcgttcagagacccagttgattcctttgttccattcggcggcaactttttctaacgtcccaagacgttccttgtcatcgcgcagtgcaactgcaatttctagttgtgtcagattttcgcgttggatattttcggcgcgttgtactcgtcttacctgatcgtcggtcaattctctaattacggctttgagtttaatatcaacggctttgcaagcaagccaacggcgttcaccggcgaccattaaataacggcctggttttttagagtttttacgcaatataacaggctcatgttgtccatctcgtttcatgtcattgccaagttccattaatgattcgatcgtgaagccagggttatccttgctacgcatctgtttttctaagtcaattaattctggatcaatctcttcgatatgctccccagagaaagcgacagttgcaagctgattctgctcttgggttggtttaattctatttccgaataaactcatcgcggttgctctatctagttcaaacaatgtctgtaacaacagcatgacgtgcctgatacatttttaaatgctgtactggcattaaatgtggaatcaggatcggaaagatatttacatgctgttccggtggtctaggcctatagattgattggatgggggatgtgttttccgcacagatttcgttagtgtttttaaaattttgatcccattccaatatgttgttggtgctattgggtaaggggtaggtggtatcaatgtcatgattttgaaggtcactccagcacttgtgctttacggtttcattatggattgaattagaacgctgaaagattgaacggtgatacaacgcagatgtgtattggtcagaatgtcaaggatgtgatgctgcaagtcagcaaaaatgtcattgatggtgaggttgccattagaggctaattgtcatgatgatgtgtgcatttgacgagtaattgcgttgagaggtgtctctttgttatctagagcactgatgtcatttttgatgaataaaagatgattagtgaatttagctggcacttttatctcggtgacgttgcttgccagggtagaagtaataggtttctctaattcgttggactggatatgctgattactgagtcagtcttgaagatgatgttgcttggcggtttattatttgatacgaggtagtcattggccgtgcggagggtttttttgcatgtctgaatcatattgaaagggggcattgtatggatcatgcgtggtacatcactttaagcgtttgaagttttttaggtgctccaagaaaaggattttggttatcagtgatggttctggatgataagatcaattttttattttataaaataggtttgatgttatataaaaacgtatggaggcgatgatttattgaggtgaaagtgattaatgaaaataaatacagtgatatttaagatgtgatcggtgttttttcatcacgatcttatgttagtacggtgttgtgtgaatttaataagttcttatttgatgttggcatcaaatatttttcagatcatgcccgctttcggaaaatgcattacagatggggtaaggtggttgtgttgcgggttttgctgatctgcttatggcacgcgtgcgcagatccatgcatcgatccttgtaaccccagtgtggcgtaatgctcgtgctgctgcatgtagggtagtgcctgttgtcatgacatcatcaacgagagcaacgtgtgcagggaggggatgtatgggaatgaatgcattgtgcaggttgctgcggcgtttatttgcattgagttgagattgtgggagggttgcacgcactcggcgtaatgctggcaggcatggtagttgcagtctgtttccgacgtggcgtgctaattcaagagcctgatcgtagccgcgtgtacgcaaacgtccgtggtgtaagctcacagggacaagtgcttgcggtcgtggccaatgttgcgcagccatggccatgttgtcagctaataggtggccacatgctaaatcttggtgaaatttgaaacgcgatatgagtttgttaattggccagtggtataggaatgctgcgtgggctgtttccaacggtggtggatcgtataagcagggaccacatgttgggtgtataccttcaagttctttaagtggggcagcgcagcggagacaggcgttctccatccgtggcagaagaagttgacaggttgcacataatgttttgccttggtggccaggttcattgcaggccagacagtaggatgggagtaaccagcgcagtaggcgatcacaccaagtgtcaggcaatatgtgattcgagttgacagcgtctttcatcctgaccagactgccgaacttgttgatcggttaccgtcaggaaacgttgatgtcctctatcatccgctacgactggactgccgaagagttacatgcgctgttcgatttgtcgttgccagaacttctttatcgggccgctagtgtgcatcgtcagcatttcgatcctgctgagattcaggtgtctacattgttgtcggttaagactggcggctgtccggaagattgttcttattgtccacaggcgcagcgttatgacactggtgtgacagcgcagaagttgatggacgttgatgcagtcgttgcgaaggcacgacaagcgaagttggccggtgcgtcccgtttttgcatgggggccgcttggcgctcacccaaggatcgggatattccaaaaattgcggcgatgattcgggaagttaaagcacttggcctggaaacgtgtgccacgctaggcatgctcaatacgtgtcaggcgcaggcgctcaaggatgctggtctggattactacaatcataatgtggatacatcgccggatttttacgattcggtcatccacactcggcaatatcaggatcggctggatactttggcccatgtgcgtgatgttggtttgaaaacgtgttgtggtggcattgtcggcatgggcgagacgcgtcagcatcgcgttggtttgctgctgactctagctactttgccagcgcatcctgattctgtgccggtcaatcttttggttcaagtagctgggactcctctgcatggtacacagacgcttgatccgtttgagtttgtacgcatgattgcagtggcacggatcactatgcccaggtcgatggtacgtctgtccgcagggcgggagtcgatgagtgatgaattacagttgctttgctttatggctggtgccaactcgattttctacggtgagaaactgttgaccacggctaatccggagactgaacgggatcaagctctgttccagcgcctgggattgcgtccaatgcatctcatggagaatgtttctaaccaagatcagcatcacggtaatgtacatgctgatatcgcttgcaaacatgttgtttgaagtgatttgttgtctatgtacaagaaccccactctataggatggggcgtcttattggcgacattggtggatgttgtgtcgttcatgtatgacggtgtcaatttggattcttggagtgatggtggcgagaggaggaaggttgttgaattttcataatggatttatattgaagctgtttccccgctgtttccccgctgtttccggtggataccgtgtgctatgagatgcggaggatccatataatgttcaatgagtttggttgtctctcatcaatcataaaaacggcgtttcatgcaactgcggaagtacgtgtagcagggatatcctgaaccgtcttttgtggcgtagagttgtcagtggatgtaaccgttatcctgtccatctttcttatcttgcactatctagcatgtgttttacttttcgatgttcatttttggcgaccattgtggttgccttgttgactgcttgcagtagcgcgccgcgttcggcttcacggttgtcttctgtatcgcagttgtccgacatatcgttgccaccgctgcgaatcggtattgcactcggtggcggtgcggccaagggtttcgcccatattggtgttctcaagatgttggaagccaatgggttagctccgagtgtggttgcgggtaccagtgctggtagtgtggttggcgcgctatacgccagcggcatggactcgttcaagatacagacaaaagcggttgctatggatgagagtaatattcgtgacttgcgttttttctcgggtggcttggtacaggggcagaaacttcaaaactatgtcaatgaactagtaggtaaacgtccaatcgaaaagctgaacaagccattcggggcgatcgccacgcggttagaggatgggcaacgtacgatgtttgtacgcgggaatgtcggtgaggcagtgcgtgcttcctgtagcatcccaggtgtatttgagcctgtcactattggggcctaccactatgtggatggtggtatcactagtccggtaccagtggatgcggtgcgtcaattgggtgctgatttcgtcattgcggtagatatttccagcaaagccactggtaagaatcctgggggattggtcggtacggtgaatcagtcgatttcgattatgggccagcatttgggtgaggcagaacttaagcgcgctaatatcgtgatccaccccaaggtgctggacattggttcgactgactttgatcaacgtaatgctgcgatcttggaaggtgagcgtgccacgattgcagtgatcccagagatccgtgaaaaacttgctcaacttcagcagcagcgtatccaggctgcacgtaaaacggccaaccagtctgctatagaagcggttgagtcgtaccgacgttgtcagaatagccgcacgcgttgggaaaagctgcgtggtaaggaaaaggattgcactaagtcatcgctttgaatgctgagtgtttgtggcgtttgtcggttggtgtcggattagaagggcagagatcgtgcaggtgatggatcatatccctggaggttttgtgagagaaaatacgcatcactcgtttttatctagaaattaaattgacgtagtggccagtctctggggtatatgggttaggctgggtgttttagaggctcagctatatgactgacattaattggagtgtatggatcactggttattcaagatcatcacgttccgtaaatgctttgtgcgggtgataattcaatgatgaggctgtcggatggcaatctggagcatacgctagggatgaatggagtagcgatatgtgtcagtcagtttttgatgatgtggaatattagggtgaagttagggtgtagtacatattcaacttgttgctcatattgagtgttcgttgtaagcgataattgctgcggcgaaaagtgtaatcagtgtcttgtaaagaaatttttgaatacattgttatcaagcagtgctggttaccgatgttttttgcccaaatgggtatggtgatgggtgcgatatggtgtgctgaccgatatcctcctattgtgctcatttcacgatgtgttctgtcctactatgtaggttggggttatcgggtgcgtttttctgtcattttgtggccgatgtgttattggcttggtgtcatgatcgtattggcgttttaaggtgtctgatcatcacaagtagtcttccccattggttttaggttgggtgggtgattggaatgatgttgatagagttgcttgctcacgttgtttattcaattcgtgtcagtgaggggtcagtgtgttgtggcaagggcaatgccagcgaagatggtcatgccgacccagttgttatgcatgaatgcgcgaaaacaggcggtgggttcgcgacgtcgagcgatgatgaattggtatccgatgagcgctacggctgcgattaaactaatccagtaggtgtgggaaagtgtggcgcgtaggccgaccaaacacaatgtgaagagcatgagggtgtacagcactccttgtacggttagatccaggtcagcgaacaaaatcgcggtggatttagcccccattttgatgtcgtcgtcgcgatcgaccatcgcacaccaagtgtcataggcggtggtccataggatgtttgcaacgtacagtaaccaagcctgtgtcggtacttttccctgtatggcagcgaaggccatcggaataccccagccaaaggctaggcctaagtaaacttggggtaggtaggtatagcgctttaaatatggataggtcatagccagaaacagccccacgacgctaagtaatacggtaagttgattcatggtgagcacgaggccgaaggcgattagcatcaatgtggcgaacatcagtagggcattgcgtggtgaaacggcgccggtgaccaaggggcgtatgcgggtgcgttcgacgtgtggatcaagccatcggtcggtgtagtcgttgatgacgcatccggctgagcgtgtcaaccagatgccagtagtgaagacacagagggtccaccatggcggtacaccgccggccgctaaccatagtgcccaccaagtgggccatagcagaagcaagaagccaacagggcggtcgccgcgtgctagcttccaatacggatcaaggcggttgcgccaatgcattagtagtgtgatcgccgatgtgaagcgttcgtaagccatactcacgggtgagttatcggatgaaggattaaggggaaattggaagctgttcagatggtgattgtaaacctggatgtgttcatgctcttggtttagtatcattggctattacgcgctcgtagctcagtggataagagtagtggcttccgaagccattggtcgggggttcgaatccctccgggcgcgccagcctatcaaagccgaccctttagatgttggcttttttgttttccgaaaacgcgttatttcatttccactcttttctgaaattgagtcgcgagtggtctttacgtcaaaagtcaccatttttccctctctttcggtctcgttgttcgctgtttttctttccgggtgtgggtgttgtgagcgctcaagatttcgatttttgtacttcaacctcttacatgtgaacggttttgaagattgcttgccgcccgttactccaagcggtgaattatagggtatttgagttttccgcaatgatgtaatccggaataagcggatgttcgaaggcatttatctggcctaaaatgatggtctatattctgctgcgatgcagggtgaacttctagggggcgcatctacacggtgatctggttcagcaattagtttagaaggctcgcttttttatggcgtgtggcgcggcaagatcgaaaggtctactggagttccttctagcaggttttttgatttcgcatcgtctgtcgcctttgttcagtaacagggggcggattccacataaacgaagaaatcctcatcatcccttacgtgaatcaatcattacatcgggtagtgtgtatttgcaggccgtttttccattattcggagattgttatcagcttttaatcattttctacccaacgtgtgtgggaatcgacatacccatcactcaacaatcgtttagcaagccatggttggattgattttgaatagattgatccaatattttgatgagtattattaaagagatatgttttaaatcttccttagatgatcaggaaatcttgataatcgtattaattaaacggttttgattgctgatacttctcttccgcagccacttgtgcaagcgagtagctgtattgttaaagagaagtttatagatagggattcataacgagtaaaaaaatattatcaatcgctacatctgaggatgcgttgtttatcttggataaataaggagggaataatgtaagctattacgctttaaagtgagtcattatcctggttgcttatcgagtatttcgctgatgacttgttcagtcaagagcttcattttgagccgattattctcaacggacttaccaaatcaacttggccgtaaaggacacaatgcacgtgcatactggatatgagttgatctatattctcaaagcagaaatggaatcaagcgttggtgtggtaaataaagaatgatctagtcttattcaaattggctccgttcatatttcttctttgtcgagaagaatgcattgcactgatcatatggaagaaacaagtgaagacactaatcacaccataagctcccatgagcgatgaatgtttttataaatcttaattcaatatctatttggaaatgaatcgaataattctagcgattatcggtgattttttcttggtgacggaattttagtgtaggccccatttgcaattgggtttacagggatacacgttaccagtattttgatgcgtgatgtttaacatttctcactagttccagcttggctatgtgttcggtgcaatgggatttggtgttgtgttatcagagatcttctggggtttggtgctgtttattatccgctagattggaaccggaagtggctaagtgggtgttattgaatcaaggtgagccatcgcagctttgacaatggagtcgagcaacgcatgatgctatgcaacatgagcgttgaaggaggtgttagttgtaggcatggtgtgaatgagtaacggatgaaagcgctgtctttagataagatgatgacaattgatgctgcatccgtgtatccgatggtttcttggggcgctcatccatcgcaggtacttcccattggcgcatcaattgcgtttctgaaaacacttgcttaagtgaacggcttgcctttgaataagcgcttgcctatatggggctcaaggaaggagagaacatttatgattttcccgtttcaaatgtgttcgtgactaaaagagccaatgctttacaccgtaatttgcaaggctagttagttgtacttaaggggtattctgtggcaaccccctattgatcctttccgttatgtacatgaaaaacaccgtccgtcctacttagattagatttgcatatatcagttatcggtgagggcggcattatgcaatcttaagattgtacatactctagttttcagtggtattttcttggggggaatatccagtagtatattattttctggtgttttgctaagggtgacatgtcaatgatattttgaggatgctaggtatctcgagctttatcatgttatatttttagatccatattctgttgttgacatggttgtttaattcaaaatggacattacgttcaattagtgaaatcaagaaatatttgataatggttgacggcacgattatttttattaaaaataaataattataaaactttcataatgtccgatatttttgcagaggatttttcgaaatgatgagcggaggctttcttccatgctatattgatttcattttaatctcattagtttttgattttgaataaattatgaagagatgtatttttattggaatttaaattccaataaaggattgcacaatatgttgatgtcttcgggtctttattatctttcacatctctacagatgcccttatggcgccacataataaattcatgatttacatgatgctaggctttgcgtggttataactggtcaatctatttaaattcaaatataaatttctcggctatcttcttaagtaatcttactagtaataatggttgattaactttatggcgagaaaataattcacaatggtcaatttgatatttaaatccttagataaagtatagttgctaagaaaattcatgagatgctgattgtaaagataatttattgggtcgtctcctcaatgtcagtattgttatctttaatctttactagagattttctaactttgatcgatgtaattttagtatgattctttggttgctatatgttacgttaagagtgtttttcaattaagtattttttattataagtaaccttgggattttaggtgccttctaagtttttattccttgcagtagaaatttttttgtggagttacgatcatccgccgtcgatttaatgtattctaattccatctagtttgttattatataatgagatctgcatctagaaataaatattgtcgttatcggctaaatgtgcatgtgcaagatttgccagatatcgtattccattggtaagttgcactatatgtctcttgaggaatgggattctatagtgctattttgagtggaagtttagtggttgactataattgaattgaatacgttgtgatggatatcatctataggtcggcatcattcatgttttatcctggcggtgtgattcgtcgtcagcatcaaaatgggtgttaggatgacttaattaatacttaaaaaatcctgttgattttaaattgctaattgctatctgtgtattatcaaaagtaatattgaaatggatgctcgtttaccatgtaatagcattaaaatctttcgcttgacttcgtatcatttttactttaagtgctcctttactgttcagctttatgggttgttaatacacttgaatttttctatcaattctgtagattgaagggatgtttaagtattttgtggcgcagacattttttgagttattcataaggttgacttcataggttgacgattggttattaggtttggtaggggtttttgagtggttttaacttatagttgaatggttttgcattttttgtattttttctattgacgtggttgaagaagtggttatactggctgggtggagtagttgatatgttattcgaggcggcattgaagctggtctcgatttagttctttgaaaagatgcgcaggtaatttgtgtggacgcctgttggattgttttgtttatccatcttgcagacgttggttcgttttccagtttttcgtatttattattgatacgattttgtgctgtgagcgtattttggcgtatgcattgagaatgttttttgcctttgggcgcacaattttaagtgaagagtttgatcctggctcagagtgaacgctggcggcaggcctaacacatgcaagtcggacggcagcacgttggtagtaataccatgggtggcgagtggcggacgggtgaggaatacatcggaatctaccttatcgtgggggataacgtagggaaacttacgctaataccgcatacgacctacgggtgaaagcaggggaccttagggccttgtgcgattggatgagccgatgtccgattagctagttggtgaggtaaaggctcaccaaggcgacgatcggtagctggtctgagaggatgatcagccacactggaactgagacacggtccagactcctacgggaggcagcagtggggaatattggacaatgggcgcaagcctgatccagctatgccgcgtgggtgaagaatgccttcgggttgtaaagcccttttgttggggaagaaaagcaattggttaatacctagttgttatgacggtacccaaagaataagcaccggctaacttcgtgccagcagccgcggtaatacgaagggtgcaagcgttactcggaattactgggcgtaaagggtgcgtaggtggttatttaagtctgttgtgaaagccctgggcttaacctgggaatggcagtggatactggatagctagagtgtggtagagggtagcggaattcctggtgtagcagtgaaatgcgtagagatcaggaggaacatccgtggcgaaggcggctacctgggccaacactgacactgaggcacgaaagcgtggggagcaaacaggattagataccctggtagtccacgccctaaacgatgcgaactggatgttgagtgcaaattggcactcagtatcgaagctaacgcgttaagttcgccgcctggggagtacggtcgcaagactgaaactcaaaggaattgacgggggcccgcacaagcggtggagtatgtggtttaattcgatgcaacgcgaagaaccttacctggtcttgacatctgcggaactttccagagatggattggtgccttcgggagccgtgagacaggtgctgcatggctgtcgtcagctcgtgtcgtgagatgttgggttaagtcccgcaacgagcgcaacccttgtccttagttgccagcacgtaatggtgggaactttaaggagactgccggtgacaaatcggaggaaggtggggatgacgtcaagtcatcatggcccttacgaccagggctacacacgtactacaatggtagggacagagggctgcaatctcgcgagggtgagctaatcccagaaaccctatctcagtccggattggagtctgcaactcgactccatgaagttggaatcgctagtaatcgcagatcagcattgctgcggtgaatacgttcccgggccttgtacacaccgcccgtcacaccatgggagtttgttgcaccagaagcaggtagcttaaccgcgaggagggcgcttgccacggtgtggccgatgactggggtgaagtcgtaacaaggtagccgtatcggaaggtgcggctggatcacctccttttgagtatggtgaatataattgtcttatcaggcgtcctcacaagttacttgcattcagggtttgatgttggcataggtttgggtttatgttggcgatttttgttctgggggccttagctcagctggtagagcacctgctttgcaagcagggggtcgtcggttcgatcccgacaggctccaccatgaaagtatttatgggtctgtagctcaggtggttagagcgcacccctgataagggtgaggtcggtggttcgagtcctcccagacccaccaatgttatatcaattattctgaatgtggtttgcgcattttttatgcttatcagccttggagctgtgaagcgttcttttataatttgatgatgtagcaagcgtttgaactttttattaataatttctcattgcaagccttaagtggcaatgtttatccattgtcttatagattttgaggcaactttgggttatatggtcaagcgaataagcgcacatggtggatgccttggcggtcagaggcgatgaaggacgtggtagcctgcgaaaagtgtcggggagctggcaacaagctttgatccggcaatatccgaatgggggaacccactgtttaggcagtatctttgagtaaattcatagctcaaggaggcgaacctggtgaactgaaatatctaagtaaccagaggaaaagaaatcaacagagattccctgagtagtgacgagcgaacggggattagcccttaagctagtatggttttaggaaaacaatctggaaaggttggccataggaggtgatagccctgtatccgaaagggccgtactagtgaagatgagtaggacggggcacgtgaaaccttgtctgaatatggggggtccatcctccaaggctaaatactcctgaccgaccgatagtgaactagtaccgtgagggaaaggcgaaaagaaccccggagaggggagtgaaatagaacctgaaaccatgtgcgtacaagcagtaggagcccttataggtgactgcgtaccttttgtataatgggtcagcgacttactgttcgtggcgagcttaaccgtataggggaggcgaagggaaaccgagtctgataagggcgcatagtcgcgggcagtagacccgaaaccgggtgatctagtcatgtccagggtgaaggtgctgtaacaggtactggaggcccgaacccactcccgttgcaaaggtaggggatgaggcgtgattaggagtgaaaagctaatcgaacccggagatagctggttctcctcgaaagctatttaggtagcgcctcatatgtatcctctcgggggtagagcactgttatggctagggggtcatcgcgacttgccaaaccattgcaaactccgaataccgagaaggactgtatgggagacacacggcgggtgctaacgtccgtcgtgaaaagggaaacaacccagacccacagctaaggtcccaaattcatagctaagtggaaaacgatgtggaaaggcatagacagccaggaggttggcttagaagcagccatcctttaaagaaagcgtaatagctcactggtcgagtcggtctgcgcggaagatttaacggggctaagctatgaaccgaagcttggggtgcatattttatatgcgcggtagaggagcgttccgtaagcctgtgaaggtgagttgagaagcttgctggaggtatcggaagtgcgaatgctgacatgagtaacgataatatgggtgaaaaacccatacgccgaaagcctaaggtttccttgcgcaacgttaatcggcgcagggttagtcggcccctaaggcgagggcgaaagccgtagtcgatgggaagcaggttaatattcctgcacctcgcgtgagtgcgatggagggacggagaaggctaggtgtaccgggcgttggttgtcccggggaaaggaggtaggctgggtccttaggaaaatccgggggtccttttaaagtcgagcactgagacgagtcttttttagatgaagtcactgatgccacgcttccaggaaaagcttctaagcttcagctcacgaagaccgtaccgtaaaccgacacaggtaggtaggatgagaattctcaggcgcttgagagaactcgggtgaaggaactaggcaacatggcaccgtaacttcgggagaaggtgcaccctttttggtggcgcgtgcgcgttatagctgaagagggtcgcagaaaccaggccgctgcgactgtttatcaaaaacacagcactctgcaaacacgaaagtggacgtatagggtgtgacgcctgcccggtgctggaaggttaattgatggggttggctgtaaaaagcgaagctcttgatcgaagccccagtaaacggcggccgtaactataacggtcctaaggtagcgaaattccttgtcgggtaagttccgacctgcacgaatggcgtaacgacagcggcgctgtctccacccgagactcagtgaaattgaaatcgctgtgaagatgcagcgttcccgtggcaagacggaaagaccccgtgaacctttactatagctttacactgaacgttgagttcgtctgtgtaggataggtgggaggctatgaaaccgtgacgctagttgtggtggagccatccttgaaataccaccctgtcgtgcttgacgttctaacctagttccgttatccggatcagggacagtgtatggtgggtagtttgactggggcggtctcctcccaaagagtaacggaggagcacgaaggtacgctcagcgcggtcggacatcgcgcactgtgtgcaaaggcataagcgtgcttgactgcgagatcgacggatcaagcaggtacgaaagtaggtcttagtgatccggtggttctgtatggaagggccatcgctcaacggataaaaggtactccggggataacaggctgataccgcccaagagttcatatcgacggcggtgtttggcacctcgatgtcggctcatcacatcctggggctgtagtcggtcccaagggtatggctgttcgccatttaaagtggtacgcgagctgggttcagaacgtcgtgagacagttcggtccctatctgccatgggcgttggagatttgagaggggctgctcctagtacgagaggaccggagtggacgaacctctggtgttccggttgtcacgccagtggcattgccgggtagctatgttcggaagcgataaccgctgaaagcatctaagcgggaagcgcgcctcaagatgagatctcccgggatgtaaatcccctaaaggaaccatgtagactacgtggtggataggtcaggtgtgtaagtgcagcaatgcattgagctaactgatactaatgatccgtgtggcttgaccatataaccttaagttgcttttttggtatgtcagtgttttattttgataagcatgaatgcttcgctacgtcatcatttcatatgcgagaaggtgaatcttccattttttttaatgggttgattgcactctccaaccgtctccctggtgatattagcgctgtggaaccacccgatcccatcccgaactcggaagtgaaacgcagctgcgccgatggtagtgtgggtctcccatgcgagagtaggtcattgccagggtcttttcccctcaaaccctcatccttagctggatgagggtttgtttctttgtgttgtttatatcaacacttgaggcacacttggctgatcttcagctctctttctcatgcctgaactcccagaagtcgaaaccacattgcgtggactgttgccctatttgaccaatcaactgatctattctcttaccctgcgtaggcgtaccttgcgctgggatatcccttcccatatcgaaagtcgtctcccagggcatcgcatcactactgtgtgtcgtcgggccaaatacttgctgatcgatactaatgcagggggaagtctcatcatccaccttggcatgtccggtactctgcgcttactggcgccagaaacgcctctacgcccacacgatcatgtggacattatgttgaataaccgtcgtgtgctacggttcaacgaccctcgccgcttcggatgcctgctctggcaagaagatggacaaattcaccctctcctacagcgcctcggctgcgaaccactctcagatagttttaatggtgattatctttatcagtgtagccgtgctcgcaatgtgtccgtgaaaacgtttctcatggaccaacgcatcgtggtcggtgtcggtaatatctatgctgctgaaagtttgttccgtgccggtatcagccctctatgcgaagctgacaaaatatctctccaacgctatcggcgcttggctgaagtggtcaaggatatcctcctatatgccatcaaccggggaggaactaccttgcgggatttcctcagtcccgatggacgccccggctacttcaagcaggaattgtttgtctacggtcgtcagcaacagccctgtaagcagtgtggaagcctcctgcgtcaaaccaccatcagacagcgaactactgtctggtgcggccactgccaaggttgaagcatctgcgttccataggtgcatcgcctgcttccaccaggtagcgatgatcattgctgggtgtcgtaggtgatcatccttatccactaccgagcccgatgacagaggtgctagcttcaagtacaccgtgcttatctcaatccttgctctccgtatgacgcgtgcctgatgggtgatactgaactgctttggtgacgtagcatgagctcaatcattagtttgctcccaaaaaacgccagtactaaaaacatcatcgctgttaatgtccagtgcaccgccttgatgcctcgccagccataccgccagcgtccaattaacaaccctccaaatatcacccaggacagaacacttagcacactcttatgcaacaacttctgttccagaaaatctctcacaaacaaaaacccagtgaacacagtgaaggtcaacaggacgaaaccaaccgtgatcgtgcggaaaagcagcttctctaactcagtcagcggcggcagagcaccacgccagtggtgaacattgcgttgccgcaacgcacgttcctgaaaccacaacatcatcgccaatagtgctgctatgcctaacgtcgcatagcctagtaacgctagacaagcatgcagctccacacgccaacccagttccgggctgggtgagtgaccgtaaccgtgataaacagcaagcaataaccccgccagagggaataccactacacccaccgtccccatccccacatgtgtactaaataaaatggtcaagccagacatcacaaaaaatgtgattgaaagcgcagaaaaaaaatgcatgtccacagcaccagcattgcctaatatcaccaaaaaatgataaccaccgtgagctaatagacccaccagcgccggaatacgccactcacctctgcgggaaatatcattaaataacaactcacaaaacagcatccataccgctaaaaaatatgtaaaaaaaacaataacaaccaataacaacaattatcacctcatataatgtaaacctttgggcaggaaagacagaggagtcgttataatcccactccgttttcctttacgtttatatcttatgttcgagtctctcactcaacgtctttctggaaccattgagcgtctgcgtggacgcggtcgcttgacggaagagaatatccgtgaagcgactcgtgaggttcgcattgctctgcttgaggctgatgtcgctttatcggtcgtacaagccttgattgagcgtatcaaaatacgagcccttggccaggaagtgtttaaatcactaactccaggccaagcattgattaaagttgtacgggatgaactggcagctgtaatgggtgactctgccagcgaattgaatctcaatgttccagcaccggcggtcatattacttgccggattacagggcgcaggaaaaaccagcatggttggtaagctggctaagtatttgaaggaaaagcgtaagaagaaagtcatggtggtcagtgctgatgtctatcgtccggctgcaatcgagcaacttaggatcctttctgaacaggtgaatgtgctgtgcttcccatcgagtgtggagcaaaatccagttgatatcgtgcatgctgcaattgctgatgccaagaagtcttttgttgatgtgctcttggttgatactgctggccgcttagcgattgatcaggggatgatggatgagatcaaggcgctgcatgacacgcttgttcctgtggagaccttgtttgtagttgacagtatgactggccaggacgctgctaacactgccaaggcatttagtgaagctttgccactgacaggtgtaatactaaccaaaaccgacggtgatgcacgtggaggtggtgctctgagtgtgcgttacatcactgggtgtccgatcaagtttgttggtactggtgagaaggtcgatgacctggatgtattccatccagaccgtgctgctaagcgcatccttgatatgggggatgtgttatcacttgttgagcaggtcgaacaggcagttgaccaggagaaaactgccaagcttgctgcgaaggtggcgaaggggaagaagttcaatctgaatgacatgaaggaacagctagaacagatgcagaatatgggagggattaatagcttgatggataagcttccggggatggggcagattcctgatcatctcaagcagcaagtcactgggaaggaagtgccacgcatgattgcgatcattaactctatgactcagaaggagcgtcgtaatccggctctacttaacggctcgcgccgtgtccgcattgctaaggggtccggtctacagccttccgatgtgaataaattgatgaagcagtaccaacagatggagaaaatgatgtcaaaactttctggtggtggtatgaaaggattaatgcggggaatgatgagtgccatgggtggtcatggaaggctaccgtttcgttgatgaagccgtgctgattcaggtcccttttataccattctcgtacttgattggatgcagggattgcaattcacgtgttcctgatccagtgatagggagaggcggctatgcttcttaagccgaatctggcttgtcaccatactgccactgatacctctagggatgatatttttgatgaacacgaatttattacaatgcgatcagctctcgtagctgcgaatgttcagcattaattttttcttatcctgcaatgctgcatgaggcattcgcagttgagatgtcagacatcagtacaccagcgatgctggattataaagtgaccgattgttctcacagcacgttcactacagatgtggtcaagcgccaagtgatcagtttgtacgtactactgtcggaactggccgattatctatctgtgtctatcatggctaccgtgctgttgttccttgcaggtgggaattatatggctgtgtcttcccaaagcggcattgttgatcgcctggatcgagaattgctctttgatctgcccaacagcatatgcaaagtggctattacgcatgtactaccgtgatggtctacgcccagtgcaatgtggtttcatcacgaaaataggccagcacatacaccgcttaaatccttccgcgatacgaatctagtcgtagcaaacggctgtattgctgcgtaaaccgaggcagtgtaaacaaggatgattcaagtgggctatgacaatgaaactcattttatgtaacggagtgccagcgaatgctacacagctcgccacgctggcattggttaattatggtcacttcacgaccctgcaagtgcgcggcggtgctgcgcgtggtctgaaactacatttgtgccgacttgagcgcgctacccagcgcttgtttggtagcatgctggatatagccgcattgcgtgctcagttatgcgctggcttggcagcattttgtcaagcggatgcctcgttgaggatcactgtatatgcgacggcgtttgatgtccgagccccgttgcgtccggttgcagtcgatacattgttggcgatttcatccccgtcagtgctatcaacggctgctgtacgagtgcgtagcgtcccgttcgtgcgctcgctacccgatctcaaacatgttggcacctttccacagttcgcattgcggcgtgatgcgcttgcggctgggtttgacgatgcgctatttgtacatgatgatggccgcctgctggagggcaccttttggaatcttggtttttgggacgggcagtgtgtgacttggccagagggtccggtattggcgggtacccagcaggcattattacgtgtcggcctggagcaactgggtgtgccgcaagccgtgcgaccgctgcagcatgctgatctggggagatttgtcgctgcgtttttatgcaatgcccgtggccagcagccattgtctgcaattgatgaccatgtatattcggcttctgaggcgccgctggctctacttgaatgtgcgttggctacccagacatggcaatcgctctaagacagagccattcagcggtatggtgtcaatcgattgaccacgatgagagctaagactaagcgcgacaatgaggacgttaattagtaatgtctgcttctggatgacccaaccaaaccatccttgattcggacaccactcattggttcactaattttttagtgtccatgtgatcttgctgttggccatttagcagtgatcctaccattgtgaattgctttgcttagcgatgtcctttccagcttaaagcgaatgttgagattcgctttttgatcattttgtaaatgttggaaatgcttcgcatgcgctttgtcactggtattcaatcgtgaaggttgccgttccattggctgcacctgggcttacttttcctttttgcgtctggatatatctggcccgtattggcagactcaacgtactactagcattactcgtggtccgccccagggtgatattttgcccaaacacaacctgacgttcactgccagtgaggaggtctaccagctcaatgcccacgttgctggctgcgtcgctggctgaagtgatggcaagtactccagactgtccggagctatcctgcgtgccatcaatatgcacagagatctgtccttgatcggcttcggccacattacctccctggcatatcaaattgatagtaaaatcacgctcaggccccttagagccgagtccgttaaaggtgttactggatactgagccgaaattgacgacaatgttttttgatccagcatcaacctcgcatgttgaggtgacaatggtgataccgaggccactgagcgtggaggtcagcacggggcttcctggaccatcgccgtcgtcataataagtagtgaatagtccattactggcgatcggccctgagccggttgtggcggcggtcttgatcagttccacttgaaaatatcccgcattgatagagagattgctattgctgcgtagcggaatatcgtaagggtagtaattggacactttacccgcctccctgtagagccggaggcctacaccctggacatcggtctgataaacattggtcatgccgctgactgctatgagcggacgcgtgaatcgagctagagaggttccgcccgcttggtcgcatcgaccagcatttttgacctcattaatgttaaagcttgctagggtaatacggtcaccaacggctagcgaaggtttgattaagacacgccctacgctaatttggatgtcttgtgggattaagtttgcgctgcggaaacaagacgcctgaacgatggggacgtgcagcatcgcaaaacatgctgtaaccgtttgccaaatcagtttctggcatccatggggacgacgaattaagttgatacattcaatgatcgacatacggtcctccaaagcagtggagttccaagcgcagagtagaaagaactacgcattgctccataataaatctaccagaatgtataatttataactaataaaatttcaaatcatttaacgaatgctggaaatatttggaatgcgccttgtcattggtattcaatcgtgaaagttgccgttccgttggccgtccctgcgctgacttttcctgcttgtgtttggatatatcgagcccgcatcggcagactgaacgtattgctagcgttggtagcggtccggcctagtgtgatagcttgcccaaacaccacctgacgttcacttccagtcaggaggtctactaactcaatgcctacgttggtggctgcgtcgctggctgaagtgatggcaagtaccccagattgcccggagctatcctgcgtgccatcaatacgcacagatatttgtgcctgatcgacttcgcccacattgccaccctggcatatcaaattgatagtaaagtcacgctcaggccctttggagccgagtcctttaaaggtgttactggataccgagccgatattgacagcgatgttttttgatccagcatcgacctgacatgttgaggtaacaatggtaataccgatcccactgagtgaggatgtcagtatcgggcgcccgatgccactgccatctgcatagtaagtagtgaatggcccagcgcttgcaattggccctgagccggtggtagcggcggtcttgatcagttcaacttggaaatatcctgtgttgaggtcgagaatagtcatttccccgacgggagtattaacattcaatgagtaagggtagaaattggatactttgcccgcttcccggtagagtctgattcctacgcccgcaacatcggttgcataaactttgctcatgccgctgacgggggtcattgaacgggtgaaagtgccgtgcaggatcccgttaccgacacatgttccatatttgccgacgtgattaatattatgggtcaacagagcaatacgatcaccgatagccagtgagggttggatcagaatgcggcctgcattaatttggatgtcttgcgcgactacgcctgtattcactgtgcaagttgcctgaacgtagggtgccagtagcatcgttaggcatgctgctatagtttgcaaagtccgttgctggtatctagagatgcgcgtggcaccaatcgtgttgactatcgacatgcggtttccaaagttgtgaaatttctaagcaaagtgagttcatcctctatgtggaggagctgatagtttgtatggcattagttttgtcggttggtcataccatctgactgacgatgagatggtcttgagcatcattagtacgtatgcagatccatctgatcatttgcgtttatccatctatcaattacttgtaaaaaatgcgatgaatatcttattcttccagttaagcgcttatatatcaatgagcagtgcacgctgcatgcgcctgccatatttttggagtcagataggagattgtttctgatgcagagggagtattgaaattgactgaattcaacgtcctttatctatgaatctcggaatcgcctcagttgatagataatccagaaattttgaatatggctggggtatcttcacccagcgttagcaaagtgggatattgcgttaatttcaatatataaaatctctacatcgatttaatgcctaaataaattatttttaatttaaattaatgattttgttgaagtgtaagaaacctcaaaccggttcaaaattgttgaaaaatattgtaaacatgttttctcactggtattcaatcgtgaatgttgctgttccgttggctgtacctggcccgacttttcctgtttgcgtttggatatagcggccccgcattggtaattgcaacgtactgctggcgttgacaggagtacggccaagtacgatagcttgtccaaacacgattttatgttcatttccgtttagcacatctactagctcaatgcccacgttgctcgctgcatcggtggctggagtgatggcaagtactccaggtaacatggatttatcctgggtggcatcaatacgcacggatatcagtccctgatcggcttcggccacattgcctccctgacatattaaattgatggcaaaatcgtgttcaggccccttggagctgagtccggcgaaggtggtactgggtacctcgccgaaattgacggcaatgttcttcgatccgctatcgacttcgcaggttgaagtgacgatgaaaccactgatcgtgctggtgtacctcggacgtccggggccagtcccatctgtatagttagtagtcaatagtccactgctcaaaatcgtaccggacccggttgttgtggcggtcttgaccagttcgacttcaaaaatttctgctggttggtatacgtaggtaatgacattatagtaatccaactgagaagggacgtagattacttgctggtctctacggctgtacatccgaattcccacccccgggacatcggtttgatagacatggtccatgccgctgaccgctgtcattgaacgagcaaaacgagtatacgtgctacccccataatagcaggtggcgaacactgggccggcaggaatattatagttccacagagtaatacgatcaccgatagccagcgaaggtttgatcagaatacggcctagattaatttggatgttgtctgatgctgcgtcggaattcataaagcaggctgcctggacgttggatacgagcagcatcgccatacatattgccgccactttccaaatccgtttttggtatctcgtggtgtgagtagcgctgaacccgttgtttatcgacatatggcttccaaagttgtgaaactgcttgggcgagtcgaagcttcgttggcaggaagttgatattccaaatggcattgttgtgccgcttgatccccccatttaatggtcaggcggccttggggatcttttgcgcgtatgtagatgaggctaccctgcgctaccaggccaacggattgtccttcggcatcaatgacctgtgcaccgaatggcaaagctttaccagtcggcgtgcgtgcattaacgatcaatgcgcggcccttccgtgttccaaaagtcactttggagattgcacctgcatagggagcgataagctggctggatgtttccagttccacatccggatctgtcccttcgggatcaagggtgatcgtgttcattcgatacggtgagacataaggtacgacggcatagccacggctatcaatgcgcacgccggatatgttggatacgcgggcacccttggctgccggtgcttcgataataaccattgtgtcaccgcgttgcggagccagtgtcgcaactccgctgtggaggacaatgctaccactggccccaagactcatctgattatagttgcggttatggctatagctgcctgaaagcgcagcatagcggctacggtattgcacattgccgtcgatcatggtggcgctgtttcgcgcatcggatgcggctatcccatacgttaatgcactgtctttgccgctagctcccactaggcttacgcggctgttgtcgtagcgtccatcgcgtgaaccgatttggctagtgactatcaccggattagctttccctagcggaaccgatactgtgaatagcatctgtgtatcgctgggcatgcttgggatctgtgagcgtaacgctgagaggccgtaactcacgcccttataggatacgttgtagcctccctggtactggatcgtgttgccgcgttggttccagtattgtcgcgctgatcctgtcaggtacagtgaaccatactgtcctaattgttggctcacagtgagttgaagctgactgcgctgtcgatagattgacgctgtgctgaggccgcgcctttcgtagtccatcgccatgatcgcctcttgcaagccataaaagcctgatgtcgaataccgatatgcagcgagtgtgatattggtattggttgggctcagtaacttgctgtagcttaagcgtagactcgtaccgctaaatgtgtcgttacgtagcttagtgcgtgcgacggtaccgtccaaggaaaatgcaccaactggggtagagagacctgcccctgctatcgctgcgatgtaccgctgactgatcgtgctgcctgcataagcggtgagtgcgttgctaatgccgcgttgatacgtcccctctaacaagtaaggggtatgactgagattgttattgcgaatcttgccggctgttaggctgtaccgctgcgaccccgctcggagcatttgcggtacagacccataggggacactgaactgctgttggcggccgtcggtctcataaaccgtgacctgtaagtcacctccatagccggtaggatatagatcgtcgatgacgaacgccccgggggcaaccgtggtgctgtagatcaactggccgttctggtgtatctccacacgcgcattactttgcgcgataccacggacgataggcgcatagccacgtaacgagtctggcaacatgcggtcatcggttgccaagctgataccacggaaaccgatagaatcaaataattcgccgctggtgtaggcgtcgcctactgtcagcatgctacttgtgttcggaaatgcgcgttgtgcgtaagtggaaatgttctgccacagcgatccttcattggaatgccagctgtaactggaattatggcgaaattgccaatcgcctagattcaagccgctgttgattccaagataggctgaatcactacgccgtctgctatttattgcatttgcattgcggccaccataccagttgaaggcatagccgatgaatcccgcgttgacaccatgatcccagagtgatgggctgacatagccacgtgctgagcgtcgcatagcggcttgagggatgcttacgtccaagcgctgagtggctacatcgaaacgtgcataggcatccggcagccattggtcgatggttttgcaggcctgcatgtcagccgctgagtctgttagcgccgatgtatcaatgccgagttcatccagcatggcgagcgtcatgcaagtgacagcttccttgtcatccttagtattacgaaattccatatcacgccggcctttccattggccgtttacataaaggtcagcacggtagaggcctgcaataacaggattgcctcgggaaaacattcctaagtcaacggaacgcgcttggccaaccagaaaactattgttgaaatttgccgtttgcgctacacgttgtggcgcggtgttatccgctttagccaccagcaggcgctgtccaagattatcaggctccgtttccgcgcaagccaatcttgacatcattagtgtgcaagtcgaagcgattgcagcgaccaacacgcgttgcttgaaatagcgccctctgatttgtgttaaatccagctcgggtgccatcagcttacggttggaattaatctcggattctgagacgaatttcacgcgactgagctgaagggagccaaccttcctccgttgcgatatttcctgctttttcatagtattttttattattaatagcgctgttaaggcattgagcccaaattactgctgagcgtttttattccgccataatcattaatgtaggtaaaagacacacttttccaccgtgatgagagtccatccgatttgttcgctttgaatgtgtattcctggccaggggttaacaacactccaattttgtcaattgtctctttccttcctttgtcatccagcgcttcggttcgggtgagcgtgacgtgataaggtgtggggttgctcacgagcaattgcccgttggaattcaccttccaactgagcgaggcgggggactcgtttgctgttcctttgagtttggctggacgatagaacaccttgattcgcgagcgaaatgcgagttgcaggtagttctggctgtctgatttatcagcagaggtttgagcatttttatcggaatgttctaacggagtaggtggaatctcgagaacgtttaaccagaacaagctttcccgatcttctggcaacgttgtggtgcccgtaaaaaataaacgcaacgcttggcctgagccaggctcgacacgactgataggcggcgttactagaaagggggctttactttcgtcaggtgtttgcttggagtcgccgtcatccatccaggtttgtaacagtgcagggttttcacccgtgttagtcacttgtacggtgacatcacgcgattgtgcgggatagacaaccctggtcccagcgatgatgatgccggcgaaagcggattgggcccataagcacgtgctgagggcaagcacccagatgcttttgctttgttgagttttcatgatcggaggaaccatatgaatgaaataaagtgcagggcaggatgacgcacggagcgacgtgcgtcaccccagtgcgtcgttatcgattattggtagatgatggtgtactgaatgttggtcaccacgctaccggctgtggtgacgccggtagcgtaatactcggtgtagtaatgcatactggctgcgccagatgcgttgaccgctacccattgtgagttgtcttgagcaccggtagtaccaacagtcttgatggggatctgcaaaccattgctgcccagcaattggacctgtacattggttgccgcactggctgtcggagcttgattgattagtctggaagtattgatatccaccgctgggcctggctcaaaataggtggctacggtgctgcccgccgtgcaatttgtcagttcaatggtgaacggtgtacgagctgcagtgcgacctgcctctctcagagtattgaacgatactgtcggcaatgtgaccgagaaattcggggttccgccattgatggtgcaggttctgtcggtcaccctaccgttgacagtgatggtgccatcagctgctaaagctgcgccgcagaacagcatggcggcggatgcgatgcttgagagtacgaaatttttcatgattttcataattaagttggaaatttcaattttgattgtggattaggaaagggaattacaactccaaaagcttgtaatcaatgttgcatcacttaaacgttttcattgtattccccctttactcggataaagccgtaatgatgatagaacgtagctgatctatagcacaattaaatggagaatattttatttattaaatttaaattagtatgtattaataataatttcaattcataaatttaattgaattatggaacatttgattgatgaaggagtggtaatgatcacttggtcgacttgatgttgattccaatgtgtaaattcacataatgatatttgttttaaaattgcgataatctcgtaattaatcagttatttgctgtgcttaagatcaaagctttgcgctaaaagctataaataagttggtatatgaccttgatgaccttttaacgatcatgtttcatgattttccttgttggaagatggatatctcagcggaattcagaaaacaaccgtagtgtttgattatatgctgcactaactgtttgatttgtattgggagaatctagagttacatcggaagctacggtgtttgtgttctaagcttgcagtatacaatctgccaattcattgtttaaggcatatgttgttggtcgtttccttagaatctgtactccagtgtggcattccagttctaccaccgtattttcagtgaaactctaaaagaaagcattgagatgatgggtgcaaacatcgctatccaaggtgatgaatgtttcttagaaaatctaatggtttacgcaggcatgcaagtgatggccgatggtctctgcgctttgaattgatcttgggttgattgtgatccctttgtctgtgcctctgagctgcacaaggtgatgtgtgctgattactcatagcgttgggtaatgctcttggagaaagaagttgtggttggttacggcttggggtgaggtagttattttgtttgacgttagcctcgtcatcggttgatacaaaagcagagaatggctgctttcagagagtttcatccagaagtaagtcaataccttcttgctactgccgcagttgcttgcgttaagcgggtaaatacaaagcagcaggatcgttacggtgttgttagctaactaagcatgtgcaggcagaatctggtgtttggcacattaagaataatcatttagaggcttgtagttactgtgcgaacaccagacaaatacgcgtgcaggcagggtatttaaagccattttgtgattctagaaaatgttgtggtcgcaggagttatcgagcacatcttcatagactaacgatggttcctcagtgagcagtgtgatcatgtccatgtgtctatgccatacgaggtatgaacgacccgagatgccaggtatttttctatggatcttgttcggtaaggttacagtggcgctatggaatgtgcgcttggatacggagaaagagggtttctaactatgctgttacagcaacgtactgaggcccagtaatgcagtcagcacagtttctcgacgcacggcatcgcgatcaccatcgaatttaaaaaattgtgggttggcgtaaccaccacgtcgtttccagctgatccaaacactgccgattggtttgcctgtactgccaccctcaggtccagcaatccctgttactgctattgcgatgctggcaccggactgtaccaatgcgccggagaccatttccaccacggtttcacgactgaccgcaccgtgtatttcaagcgtctccggacgcactccaagcaacgcctgcttggcttcgtaactgtaggcgacgatgccacattcgaaccaagcagatgatccaggaacatcggtaatcgctttagcgatccagccaccagtgcagctctctgcagtgaccaaccgctcgcgtgtcatgcataactgcttacctaaggtttcagataggttacggatctgctggtcggttggcattttcggtacgcattaaagaggagggtagttgttttcgttgaactgaacttgattgtcttctataaaatcggtgcatgttttaatggtcatgatgcaggtacgtggcttggcgtggtaggcgcaaactgaccaagaatacgaccgccatcatcgctgccacgtaccagaagaacaccgtttctagatcgaagctcttcagtcccagggcaatatattcggccgaaccaccaaatatggcgttacctactgcgtaggcgaagcccacacctagcgcacgtacttttgctgggaacatctcggctttcacgatggcggagatggaggtgtagaagctgataatcgacaacgctcctacgatcaatatgaatgcgggtagtggtgaatgaatacgctgtaatgttgcgaggatcggtacagtacagaccgcacctaacccaccaaatagcagcatgttgttgcgccgtccgatatagtccgacagtaggccgaacaatggttgaatgcacatatagacaaacagtgcgccactcatcaccagactggcagtctgtttggataagccggaactgttgactaggaacttctgcatataggtggtgaaagtgtaaaaaatcagcgagcctccagcggtatatccaaatacggttaggaatgcggtgcggtgttcgcggaacagggttgatagcgaaccggcatgggtgtcatgtcggttatcctctgattgagtttcgctcagtgtgcggcgtagtaataacgcaactgctgcggcaatcgcaccgatcatgaatggaatacgccaaccccaggtgcgcatttgaacttcagtgaataaggcttccagcaccaccagagtcaacactgccagcaactggccgccgatcagcgtgacgtactggaaggaggaatagaagccgcgtcgtccacgcagcgcaatttcactcatgtaagttgcggtagaaccgtactcaccacctaccgatagaccctgtatcagacgtgcgagtagcaataaaaatggcgcccaggcaccgatcatatgatgggtaggaagcgtggcgatcatcagtgaaccgccacacatcatcattaccgagatcaataacgagcgtttgcgtccgtagcgatcggcaatccggccgaacagccagcccccgataggtcgcatcaagaagcctgcaccaaagattgcggcagtgttgagtaattgtgcggtttgattggattcagggaaaaactgggaggagaaatacagcgtggtgaatgcgtagacgtaaaaatcgaaccattcgactaagttgccggaggaaacggcgatgatcgcgaaaatacgatggcgcttctcctctgcggtgtagtgtgaaagtgcaggggagaggctgtcggacatcaaaagggcgctccgtaatgctgtcaaaaggtttaagtttggtagcacctagtatccgggggatacatactttgagtgcagagttggagtccaagcatcacggtgatattgcagcaatgcacgcagcggtattccatagtcgcttgcggctaagcgttcaatttcagctaaagaaagatcgatttttagcaaccaaccatgttcatcagtctgctcttcacgtactcccttgagttcgtgaagacgtgcgcgtaaacgtcctgctgaaggcagcaagcgtagttcgccctgtacattttgcatcttcaagcgatgatccagtacttgttgcagcaactcaacgccgtgtccatgacgtgcggacaaccacacacgctcgcgtcgtgcttggtcaggtatcccgtcctgcgtgtcctggcgcacttcggcgccctcaatgcaatcgattttgttgaacaccagtaattgcggcagttcaccggcaccgattgcttgtagtacttcgtcgacttggtcgatgcgttcctcacgtagtggatcggctgcgtcaatgacgtgtagtagcagatcagcttcgcgtgcttccgatagcgtagagcggaatgcggctaccagttcgtgcggtaaatgacgcacaaagcctacagtgtcggcaagcatcgcactgctgccgggcaggacaatacggcgtactttggggtctagcgtggcgaacagttggtcggctgtgtaagcagaggcgccggtgagtgcattaaacagagtcgatttaccggagttggtatagccaacgagtgcgatacgtggcacttcgctacggactcttgcgcgacgcatctgggtgcgctgcacctcgactttactgaggcgtttctgtagttgttccacccgtttttgcaataggcggcgatcagtttccaactgagtttcaccggggccacgcagaccgatcgcaccaccacgttggcgttctaggtgagtccagccacgtaccaaccgtgttgccaagtgccgtagctgtgctaactcgacttgtagcttgccttcatggctgcaggcgcgttgtgcgaagatgtcaagaataagcccggtacgatcaattacgcgacgttcaagagacttttccagattacgttcttgcacgggggagagtgaatgattaatcaggatcaggtccgcgccggtggcgtcggcggttgcctttatttcttttaacttgccgctaccaatcagtgttgatgggttcggacgatttatccgaacggcgagagatccagcgacagttgcccctgcggacctggtcagatccgcaaattcctccaaagcgccatcttcggcagagtgatcggtgaggggttggatcagcaacgcatactcgcctttgcgtgagcggtcaaacacacctcactcccggatcattccacttcgtcatcgttaatttgcaacgtatcactgcctgactgcacatagcctccacctggcccaactcgtacgttgcgcgcaggtaccactgtggaaatagcatgcttgtacaccatctggctgacagtattacgtagtagaaccacaaattgatcgaatgattcgattgtgccttgtagtttgatgccattcactagatagatcgacacaggtacccgttcgcgacgcaatgcgtttagaaaaggatcctgtaaagattgccccttagccatcgaaaactcctttatttttattattactccggtcagccggtttgttttctcagtcggctccggagggatgatgttacaccgctgagacacagtcgacatgtttttatctgtttaaaaatgcttccacgactttttcgattctggattgatcatgttctggatcgaaccaaagggcatccagctcgccacgtagccatgtcaactgacgtttggcgagttgacgggtggcggcaacgccgcgctgatacagcgtctcggcagtgtacatgttgtccaagtgttcccaacattggcggtagccaaccgcacgcattgctggaagattcagtggtcgagccattgcgtggatggatgggtgtgtacgtaacgcattcacctcggcaagtaggccgttatccaacattgccttgaagcgctgcgcgatcctgaagtgcagtactttgcgatgggtcggagcgagcaccagcttaagaacccgcaaaggtaaccgttgtttgagtggctgcttttgccaatcactcatcgatcgtccgctcactcgatagacttccaatgcacgctgaattcgctgtgggtcggtggcgtggatacgtgcagccgtgattgcatcgacctcggccaaacgtgtgtgtagtgttgcccaactgtctctcttggcttcagccgtgatcatcgcgcgtatttcaggatgagctggaggcatatccgaaagacctgccagtaacgcacggaagtacagtccagtaccgccagtgaggattggtaatgcgccacgtctaacgatcatgtcgattgcggcgcgtgcatcatgcgcgaaatcggcagcagaataagtttcccaaggttcacaaatgtcgatcaaatgatgcggtactgatgcacgcattgccgcgttcggctttgcggtaccgatgtctaagccacgatagaccagaaccgagtcaacactaatgacctcccctccccaacgtttggcaatatcaatggccagttggcttttgccgcttgcggttggtcccatgagtacaattgcggctggtctcgtgtcggctggcatcagtcgtcatggggcgaacgagccactgtagttttggtatgtgttgcaggtgcagccgctgctgaaactgcctgccaaactttgagggcatcgaccatagccgccacatcatgcacccgtacgattaacgcgccgcgttgtaccgcaatgagatgtgcagcgacggaggcgtacacgcgttcgattggtaactgacgtcctgtcagttcgcccaagctactcttgcgtgacaatccggccaacaatgggatgccgagattggtgaaacgctccaatgccgctaacagtgcaatgttatgttccgtggtcttgctgaaactgaaaccaggatcgatcagcagtcggtgtcgttcgatacctgctatctcggcggcaaaaatccgctcggccaggaaacggtggacttcatcaaccacatgatcatactgtggtgtttgcgttgagtgcggttcacctttcatatgcatcaatatcactggtacagccagttctgctgctgctcccagcgctccgggagtgcgtagtgcatagatgtcgttgatcaagccggcaccggccgcgactgccgcacgcattacctcaggtttgaaggtgtctacgctgatgacagctttatcgtaggcagttaatgccttgatgaccggcaccactcggagtagttcctcctccagcggtaccggcgctgcaccgggacgggtggattccccgccaatatcaatgatgtctgcaccctcagcaatcagacgtaatccatgcgccactgctgcatccacagaatcatgcaggcctccgtcggaaaaagaatcaggagtaacgttgaggatacccatgaccaatggacggtctagacgcaaggtgcgtccggcgcagtgcagggttgggatagtgtcaaacatcggaaacttcctttcctggtgctggggtggtggatgagcgttgtaaggtaaccatcatggtatggctgatcgttaaaagccgatagattcactagcaacagtggcgatcacggttttcaacatattagtggtgtgttatgccaccggtgagtggatcatggcacagccagcaacaggtctggaaagtaatactacggtcattgctggtgctatctgtggtgtgacaatttattgcgtttcaaagacacaaccggcccaggatgactctagggccggtggatatgacggtgcagtgattactgtttagatcaaacctgctcagctggaacaacgatggtagttaatgggcgaggcttactcatgtcgtcgtcgctaccattgtcagaaggtttaccccagccaaccggcgggggcggttcacgaccctccataatggcatcaatctgaggtgcgtcgatggtttcgtactgcagcagcagctgggacatcgcgtggagcttatctaagttatcggccaagatccgctttgtacgagcgtacgctttgtccaagatagagcgcactacctcatcaattttgcgggccgtttcatctgagacatttttatgttgagtcacagaacggccaagaaacacttcatcctcttcctcgccataagcaaccggacccagttcatccgagagtccccacttggtgaccatattgcgtgccatcttggtcacacgttcaatatcattagaagcgccagttgtgactttgtcctcaccgaagattaattcttcggcaacacggccaccatataaggagcatagttgggactgaatagccactttattgattgagtatttgtcaccttcaggaagatacatggtgacgcccaacgcacggccacgggggataatcgtgactttgtatacagggtcatgctcaggtactaagcggccaacgatggcatgaccagcttcgtggtaagcagtaagggttttttcttcctcactcattgccattgagcgacgttcagtgcccatgagtattttgtcgcgggcagcgtcgaaatggttcattctgacttccttttcgttgctacgcgcggcgaataacgctgcttcattgcacagattggctaagtcagctccagagaaaccaggggttccacgtgcaatcacgagcggctcgacgtcattggctaacagtaacttacgcatatgaacacctaggatctgctcacggcctttaacgtctggtagagcaaccacaacttgacggtcgaagcgacctgggcgcagcagcgcagggtcgagcacgtcagggcgattcgtcgcggcgatcacaatcacgccttcaccgccttcaaagccgtccatttcaaccaggagctggttcaaagtttgttcgcgttcgtcatggcctccgcctaagcctgcacctcgatgacggcctaccgcgtcgatttcgtcgatgaaaataatgcatggggcatgctttttggcttgctcaaacatgtcacggacacggctagcaccgacgccaacaaacatttcgacgaagtcagatccagaaatcgaaaagaaaggtacttttgcttccccagcgattgctttggctaataacgtcttgccggtgcctggaggacccaccatcaagactccacgtggaatcttgccgccaagcttggtgaatttagtggggtcacgcaaaaaatcgaccagctcaccaacttcctctttggcttcgtcgcaaccggcgacgtcagcaaaagtgattttgatctggtcatcgccttgcaattttgcacgggatttcccaaacgacatcgcacctttagcgccaccaccttgcatctggcgcatgatgaaaacccagaatccaataattaagatgactggtagaaaattcaatactagagaccaaaagcctgggcctgtggaaggcttttgccgggtcatctcaatgttcttgctgtataacacgtcgaccaatttgtcgtcgcgtggtccgtagaccaaaccctcgctaccgtcggtgcgtttgaagcgaatcgcgttgacagtcaggccactctcatcggtgtagttcaccgacttgatccgaccgctatccacttcattcagaaattgtgtataggtgattggttcgttgcctatcactccaccaatacgtggcgaaaaactttgaaataccaccatcagcacgacggcgacgaccacccacagtaacacatttttggttaagtcgttcatcctcattggttccagtgcctctcaatttactctcaatattcgaatgcgaccactcacgagcagcttacttcattctgagtgagcttgccgtcaccaaggatataaacctctggggagcgcttgcgggaagcaagtggtttgcggatcgcaacttttttatacctgtgtcgtaattgacggatgtagtcatctgatccgactccatggaacagtttgattaggaacgaaccgcccggtttgacatggatgtctgcaaaatccattgccagctcagctaagtacatcatccgcggttggtccattgcgtccattccactcttattgggggccatatctgaaagcacaaggtcaacgggttggcctttgagcattatctcgagctgagataagaccgctttatctctgaagtcaccttgaaggaactctattccaaccagcggcgccatcttcacgatatccaaagcgatgaccctgccgcgatcacccatctgcttgcgtatttgttgcgaccaccctccaggtgcagcaccaagatcaatcacaaccatgttcggtctgaggattcgatcacgtttaagtatttcttctaacttatatgcggcccgtgagcgcattccctcggcttgagcttttttcacgaagggatcggagaaatgctccttaagccaacgctgactgctcttgctatgtgacatctgaaaaccgaggaaaaagaaccgccatgatactctaaatatctaattcggcattccgttaaatcaaccatgaccatcgcgctcacttccgctcaaaaccgtttcctgcgcggccaagcccatgatcgcaaaattttattgcaaactggcgataaggggttgacttcggcatttctttcagaattgaacgatctcctggaacggcatgaacttatcaaggtgaaggttgttaatgaggatcgcgaaatgcgcgatatgctgattgctacgctgactgctcagagcggtagcgtattggtccagcgtattggtcacatcgctattctgtaccgctgcaataaggaaagttgtcaaatcgtgttgcctcgcgcttaagcacacggaggtcagcctgtgctctttactcaggaacaacctgattacatctacgtcctacgccttgctgatgcccaccatgcgcgcatcaatgatcgagtgctgtcttccagcttcatcctgatgccggacacgttagttgaggattggtcagtggccaagctggagcagttgcaagccactgatttggaacccgtgctggcgttggcaccgacgctagtcattctatccactgggaatcgtcacatctttcctccagccgtagtgctggcaacctgcctgacgcgtggaatcggcatcgaaatcatgaccaacgctgcctcagcgcgtacttacaatgtgttggctagtgaggggcggcgcgtggcattggcgatgatcttatccggcgagcagtaaccaaggtaagcagagcgcttaccaagaaaatcatcattgcgtcttgtttctcgcctgcagtgttttgtcatactgcagcgctataaacgactaaagaaacataaagatcaagtacttggcacacttaatcgagtcaggaaaatggttcttgcttggtgtatgtgagcgatatatttagtttgcatctgatacgcgcagtgcattggcaccttgcctttgatactcagagtgtttctgagcaaagcagggaaaatatggtgaattggagcctatttttcctaaacgatgcgatatgcatgaaaacgatagctgggtgaactgcgttgtgattttttgcacgtgtgcaatacataactctgtttctgccgatctccttgaatcaactttctacgcttggcggtagcaatccgatggattgccgtgtttcccctgtgcgagtgaatctctgcaaccgtgtatccgcattccaatgattgtttgtggaattttttcggccagtatctgttgttgcccgttcagttctctatatctcacttcctgcgtttgactcacatccgggtccctgattgagatgatattcaaagtagcgttttgttgcgtacggcccccttgtcggcgctggttgcaagtaatgcatacgccttcagcgcactgctgaccttacgcgtccgtgactgggccggcttccagccgatggcatgttgttcgaggcgccgtgaagccaactcctcttcgctgatgagcacattgatcgcgcgctgtggaatgtcgatgcggatacggtcgccatcgcggatgaggccaatagcaccacctgctgcggcctcgggtgaagcgtggccaatcgataaacctgaggtcccgccagaaaaccggccatcggtgaatagagcacattgcttcccgagacctttggacttcaaatacgacgttggatacagcatctcctgcatgccagggccgcccttggggccttcgtagcgaatcacgacgatcatgcctggttgtacctcgtcgctaaggattcctttgaccgctgcctcctggctttcgtacaccagggccgaaccctcgaacacatggatcgatgcgtctacaccggcggtctttacgacgcagccatcctgggcaatgttgccatagagcactgccaagcctccttccttcgagaacgcatgttccatgtcacggatgcagccctcggtgcgatcagtatcgagtgacggccaacgcgtactttgactgaaggccacttgggttgagatgcctgctggacctgctttataaaacgtatgcaccgcttcatcctgcgtcccgataatgtcccatgtggcgatggcctcacccagggttttgctatgtacggttgcgacgtcggtatgtaacaagtttccccgtgctaattcagctagaatcccgaagatgcctccagcgcggtgcacatcctcaatgtggtatttctgcgtgttgggggcaactttgcataattgcggcacattccgcgacaagcgatcaatgtcttgcatcgtaaaaggcacttccgcctcctgtgcggctgcaagcaggtgtaaaatcgtattagtcgagccgcccatcgcgatatctagggttatcgcgttttcgaacgcagcgaatgtagcaatgcctcgaggtaatgcggtggcatcttcgttcccataccagcggtgacataactcaatgacagtgcgtcccgcgttcaaaaacagttgtttacggtcagaatgtgtcgcaacgacagttccgttacctggcaaggataaaccgagtgcttcggtgagacagttcatcgagttggcagtaaacatgcccgaacatgaaccgcaagtggggcaggcactgcgttccacggcagcaacttcctcgtcactcgcgtgagggtcggcagccagcaccattgcgtcaactaggtcgagtttgtgatcagtcagtttcgtttttccggcttccatcggcccacctgagacgaacaccgttgggatgttcaggcggagtgatgccatcagcatgccaggagtgattttgtcgcagttggagatgcataccagcgcatcagcacaatgcgcgtttgccatgtattcgacggagtcggcgatgatttcacgactgggtagcgaatacagcattccgtcgtgccccatcgcgataccgtcatctaccgcaatcgtattgaattctttggccacaccaccgagacgctcaatttcacgtgcgactagctggccaagatcctttagatgaacgtgtcctgggacgaattgagtgaaagaattagcaatcgcgatgatcggcttctggaagtcgtcatccttcatgccggtagcgcgccataacgcacgtgcaccagccatattgcggccgtaggtggaagtcttggatcggtactcaggcatggtggtgcgaaggtgagagcgagtagcagtcagagcatctctacagcaacaagcgatgcctattgaaagatcactttgcgataaaaatgcctccttacgttagcatggggcgatgtctccatgtccttccacttatatttatgaggtcccctccctattgcagcgccggttatctctttattctggttctggatcgagaaacggcgcactgtcatccatttaatcatttaatgtggcaatgttctgtacaaaatacgctacgtttcatcgggtgatagagaagagatacgttgagcgtccttgcgttcgcttgcccacaaaggcaccttgctgtagctgtagctgtagctgtagctgtagctgtagctgtagcctgccgaacaaccctgtgcccctcccattgcacgtgtcctgacggttcctcggcacttgcctgcggcacaccgcagcatcttgttccgtcccacgtctagatgaagcagcgcgcgtcgcatgtgtaccagtgctggctgcaatggcctgcccctgcccggttgtttgcgaagtgttggtattgcactgcctcgtctcatgagccttggcattgcctgagatgtgactgccttccccgtggaataaacggttgcttgtgatcctgcgctgtacgtagatcgttagcagcatatgcctaatgcaatcagcgagagttggcgtctacgttgaattgatgcgtatcttcatcccccaacgggcactgctggccttgcctgctctggagcatttttagaatcaatggattcctggtgtttctcgtgccgcgggggaccgtaattggttgatgactccgtccctcatcgacactgcaacatcttttgccaacatcgttcgtggttattgtagatacgagaatgatgaggattgtcatgatgcagcaacccaagtgtgattcatgaccccatcgcgtgcctttaccaaccgcatgacagcggtcctcactgctaaaatgcttagccacaccctttcaatgatctcacccatgagccagaccgccaccgcacccgccaacgcccagaagcgttacaccgtgcatcgccgtgatctgccattgagctgcccaatgccggagatggcactatggaactcacatccgcgggtctatctgccgatagaggatgaaccgaatggcgaggtcacctgcccctactgtggggccgtctacacgttaattgactgaatgtttgtcttgccgacgcgtcgtctcaccgtcgtacagctactgccagcactatgttccggtggtgtcgaacgctcaaccttggaagttgctgcagcgctggtgcaggctggacaccgggcgattgttgtctcggcgggcggacctttggtcgcattcctgctcagcatcggtgctgagcacatcaccttggatattggccgcaaatcattgctgacactacgtcacattgctgcgctgcgtcgcttgtttgcccagttacgcccggacattgtgcatgcacgttcgcggttacctgcgtggctgacttggtatgcattgcatggtcttttcttttccccaaagccgcgattcgtcactacggttcatggtctcaatgcgccgaacccctacagtgccgttatgacctatggagagcgggtgatttgtgtttcaaacgttgtgcatgattatgtactccggcattaccgccgtaccgatccgcagcgactgcgtaccatcccgcgcggcgtcgaccttgccaggttccgacgccgaccgtatccggatcgctccgcgcgtcgttgggtcaggaaatatgtcccgtgtttggatgacaacacccgtttgctgctgatgcccggtcgcggcaccaggttgaaagggcatggagatgcactgcttttgctggcttttttacggcgtgtttccgactacaacgtctgcttgtggctgcctggtgcgtgtgaaccaggccgtgaatcctacctggctgagctggaagcccaagcccgcgagctgggggtgaccgatcgcgttgtatttactccgccgactgagcatatcgttgaagcctatgcggccagcgacctagtgctgcaactgtcgcgcaaacctgaagcattcggtcgtaccgtgcttgaagcactcgcggttggtcgcaccgtgctcggctggaatcatggaggtgttggcgaattactcacccagttacagcctgatggtgccgtccccccattcgatatagccgcactgcagcggcgtgctgcaatgctgttgatgcattcccctgagctacctccggacattccttacacgttgcagacaatgcaatcggccacgttgcaggtgtatgacgaactctgcacctgaccttgcgtacatctctaagccagcattgctgcttgatgttggccgttgggcgccggtatgcgtggtggtgttcgtggccttttggccattaccaggattagcggctacggtactcaccctgagtgcgttacttgccagctactctctgatccgctatcgcttccgtggtggtacccagttgcttgatagtcccgcctgggcgctgaccagcgttttattcatggcttactggttgccgcaggtggtgtctttattcggagcgttggagctttccgagagcttgcgtaaggtggcgacggacctgcgctatctgcctttcatgtggttatgtgcgattgccgtagggtccccagagcgccgagagcgcaccttcaaaggattggccgtcattgggttgatctggaccttggatgccttggctcaggcaatgttgcacaccagtccgttgttctggtcgttgaatcaactcaaacaggcgatcagtggctatggattttgtagcacccggcagatgatcttagccgaccgtctgagcgggatttttggcccatgcaatctcaaacttggccagactttggcaacgctgtcgccatttgtgctgtttgcaatgcaacgtcgcggtcttgcgctgtggttactggttgtggtggtgcttggcatcgtgctgttattggccggctcgcgtgcttcctggatcacctatgcgctgatcctgatgctgtcaggatggagggtgcttgggatacggcgcttactggggatgggtgcccttttcttgccactggcgctcgcagtgattgccttttcacctcaaacacgcgagcgcattgaccgtaccgcagcggtttttgctgatcatggcgctggagtggaccaggcattgtctggacgcagccaaatttggcaggcggcgttgtgtatgatccaggcacaccccttgagtggtgtcggcgtacggggtttccgtgatgcttatcccgcgtgtaatcccactccagagcggatacccgcctggggggcaggtcctgcattgcacgcgcaccaaattgtcttggaaatcctttctgaaactggcgtgattgggttgctgttgtggatcgctggcgcagcaatggcgtggcgtgcttggcgttatgcgaccgccgcggcgcgtgatcgtgcccgaccagcgatgatttcgttactcgcgaccgtgttccctttcaatacgcacttggcgttctactccagcttctggggtgctttgatgctgatgctggctggtctctatgccggggcgttgcttcaaaatggtgtcattaagaaaacctgagcagcaggctgatcatggtcaatgaggtgatggcattggcagtcaagcgataccgtgcaggtcgatcatatttgcactgttgcgtcaccgtgtcgtagtgaatatcggtgacgcgtcagcctgctcaagggatcggcaaggaatagatgttgatccatgctccaagcagaccatcaccatacacttagttgtagaagcggctgcgtccctctggttgtcgcttaaaacggcgatgaatccataaatactgatccggagcctcgtctatcatcgtttcaattacttgattaatgcgtgcggtgtcagcggcgaggtcttcggatgggaaatctgccaacggtggtgcgatcttcaacacgtagttccctccttggcggcgatgaaagtaaggcaccaccgcgcagcccgtgagtcgggcgagttgatgcgttgcggtgatcgtagctgcaggcatcccaaagaacggtgcaaacacggtctctttgccccgcatgtcttggtctggtgcataccacaggaagccaccacgtttcaggtgcttgatcgttgcacgcaactcctcgttggcaaacatctgggtggcgtagcgtaaccgtccacgtttgatcgcccattccaatactgggttgcgatggcgccggtacatgccggccaatggcacgtagtcgcagagcagccgtccgcatatctctaatgtcatgaagtgcccggagacaagcagtacgccgcggccttcgcgttgcagttggtgtaggtgttctagcccttccacatgtatccctgcacggatcacgtcgatgcttccccaccaggcgcgtgcaaattcgaacaagcccacgcctaaggcgtcaaaattctcgtgcaacagctttttacgccacgcctcatcgtgtgttggaaagcacagccgtagattaacctccgcggcacaccgccgcgtcccgacaaggcgcagtgccattgctccaatcacccggcccagacggcgctgtagtccccaagggagacgtgcggccagaaccattccgcacagtgctacatacattggccagtgtgctggtttcagtaaggatggacggggagtcacgtttgtagaatctgacatagcgtaattctatgggatcggtttgagtatgttccctgatagatgcatgcggtcatcggcttccgtatcctggtatgcatgcggaaagatccgattgaatggctgttgcgcgcactatattcggtgctgttgtatttattactgccctttaccatttaccacttggtctggcgcggtttccgggtccgtcaatatttcaaccgatggaatgaacgctatgcttcgtatccagcagcgtatgctcgtcctcaggtgtggttacatgctgtttcggtcggtgaggtcaatgctgctgcctcgttggtgaatgcgttgcgccaacaacggccggatatccgttgggtcatcaccaccattacccccacaggatctgagcgggtgcgtgcgctctggggggattcattggagcatgtgtatttgccatacgatgtgcccggcagtgtggaacgttttctgcgctattttcgtccacaattagcgctgattttggaaacggagctgtggccgaatttgctgttcggttgccgcagtcatggcattcctgtgtatatcctcaatgcacggctgtcggtacgttcgttgcgtggttatcgtttgctcaagccgctcatcaggcgtgcgttacgttctgtggtgtgtgtggcggcgcaatcgcaagaggatgcactgcgctttttgcgtctgggtgcgcgtcccgatcaagtggttgcattaggtaatttgaagttcgatatccccacaccacaggatcttgatgttttcatggctgcgtttcgcagttgtgttccgatggcgcgtccggtgtggattgcggccagtacgcatgaaggcgaggaggctgcgatcatcgatatccacgcgcgcttactacgtcgtatcccgaatttgttgctgttgtgggcaccacggcacccggagcgttttcataaggttgaaggactggcatacgaacacggttggcgtgtcagtacgcgcaagcaacacacgtggccagatgtgacaaccgacgtgtttgtcattgatacccttggtgagctgagtgcattttacggttgtgctcaggttgcttttgttggtggcagtttgcagccaatcggaggccataatttgctggagccagccgctgttggtaccgctacagtgactgggccgtatttgcacaatttctccgaaatctcgcggcgcatgaagggtgctcaggcgttggaaatctgtgccgatgccgaagcggtcggcgcgatgttggaacatctactggcagatccaagcaagcgtagccagatggcccaggctggattggcgttagttgctaacggccgtggtgctgttgcgcgcacattggtgcagatcaatcctcatttgccatcaacgatgtctgtcgagaagtgagcgcggctgggttgctgtgttcaaaaatgttaactcatgcgtattcgagctcatttgagccattggctcgaatcatatggctctgagaaaaacactgatcaggatggcaaagtcatccattcaacgtaggtcagattccatgcgatccatgcagttttcagacgcgcttagggagccttgcttctgtttggcgaggtatacagggataccgttaggcacgtatcacgcgctgaaccaatacgatcacaccagataatctacgccaagtgcaggcaatacgctcaagtgaaaggacgctttgctgcgctcatcagtgagacatttgaaagagtatagtctaggggcttttgtgattaatcactacctggacatctcacactcctatgacacaaagctccctgtttgcttcgttacgcgtgctgattggattttgtttggttgctttgatatgtccagctgcgattgcccaaaacgtcgccgcgatgaagccatcaccccagcagatagcgtggcaggatcttgaatttggtgtcatcgtccatttcaatcctaatacttggcttgatcaggagtggggcgatggtagtgcgagtcccaaggtgttcaatccgacgcacgttgatcctggtcagtgggcgcgggcagcgaaggcggctggagccaagtatctgatcttggtcgctaagcaccacgatggttttgcgctatggccaacggcgcagagcgagtattcggtgaaaaatagcccgtggatgggaggcaaaggcgatgtggtgaagttgaccgctgcagcggtgcgtcagcaagggatggggttcggaatctacctttcgccgtgggatcgtcatgagccgaagtatgccaatgttgatgcctacaatcagttttacgcggcgcaacttgttgaactggcatcgcactatggcccacttaccgaatggtggttggacggtgccggcagcgcaggccatgaatacgattttgataaatatctggaacagttgcgcacctaccagcccaatacgatggttttcgccgacacggcattattcaaatatggtgacatccgctgggttggtaatgaggccggtgttatcgaaggggagaactggaatgtcattgatcgccacggtgatttgcgttggcgcccagtagaagtcgataccccattgcacaggttggagtggttttggcatccaaacaacgagcgcactctaaaaagcgtggatgagttgcttgcgatctgggagaagagtgtgggccgcggtggtcaattggtcttggggattgcgccagacacgcgaggactgctgccagaagcagatgtcaaacgattacaggcaatgggggcagcgattcaggcgcgttacggtgctggaaagaatttggtccctgtgcatctgaaaaatcaccaagccatcgttgcagcggtggatggtgacgtagatacgttttggagtgcgccgcacggttctcacagcgcaatgcttgaactgcattttaagcaacccatcacatttgacgctgcgctcactatggagtggctcaatgatggtcagtgggtacagaagtatgcgattgaagtgtggcagaaaggcaaatgggtacgtgttgctcaagcgcaagcaatcggcaagatgaagattgatcattttgggtcactgactgcttcccgcgtccgtctaaatattctttccagtgcagatgcggcgcatatccgggagtttcagttgttcaatatcggtaatagcagagcggcacattaagttgtagggagcaacacaattacctatggggtcgctgtgagggaaggagtgcgctatcgcttcagtctgcaaaatcatcccatttcgcggttttatcgtaagaccggcgtttctgtcccgtagaaaaggatgtggaatccagagagggtaggccgttacaattctaaacttacctcgccatcctggcgactgggcaatatcaggaaattaatactatggtcaagattcgtctgactcgtggtggtgccaagaagcgccccttttaccagatcatcgttactgattcgcgtaacaagcgcgacggtcgtaacattgagcgcgttggccactataacccggtggcacagggcgctgaatcgcgcgtggtattgaatatggctcgtgtcgagcattgggtcaaaaacggtgcccaactgacggacaaggtgcgtagcttgcttaaggaagtcagcaaaacccaggcgactgcggcctaatgaatgggattgggtcacctgatccaacccggataccgcactgatgaaagataatgagcgccgtatcctgctaggaagggttgtaggtggtttcgggttgcgtggtgaaatcaagatagagtcttggactgagccacgggatgcgatcttccgttaccagccgtggttattacgttctcctacgggtaccgagtccatgttgaatggtgcccgtggctacgagactggcaagcgtttgattgcaacctttcctggcatcaatgatcgtaatgcagtcgaagcgatctgtggtacggaaatctatgtgccacgcagcgccttgcctccacctcaccccgacgagtattactgggtcgatttggaagggctgcaagtacacacccttgaaggtgtggttctcggtagcgtttcccatctgttttccaacggtgccaatgatgtgatagtcatccatggcgagcgcgagcgcttgatcccgtttgtacagcctgattacgtgaagtcggttgattttgaggctgagcgtattgttgtcgattgggatcctgagttctgatcgtggatgcgtgatggtgtccatgatcaggccagttctgtcccgtcttgccggatactgcttcaccacagcatccctcatccaatccggtttcagatatcccgcttgcatgcgtattgacgttatcagcttgttccccgagttcattacacagtgtgtcgggtttggcgtgatcggtagagcacaggaacgtggtttgcttgatttacacaactggaatccacgcgactatgctcaaggaaattaccggcgtgtcgatgatcgtccgttcggtggtggtccagggatggtgatgctgatcgagccactgcgtgcctgccttgaagcggtacgggcagcagatcctcaaccagcgcccttgatttatctcagtccgcaaggtgtcctgctgaaccagtcccgcgcgaggaagctggcgatgctgccgcggatgatattgctatgtgggcgatacgaagggattgacgagcgttttatcacccacgaagtaaacatggagttgtcaattggcgactatgtgttatctggcggtgaattgggagcggctgtggttgtcgacgcagtcatccggttacaggagggggtattgaacgacgccgagtcagcgaagcaggacagcttcgaagcagtcgatagcctgcttgattatccccactacactcacccatccaatcatgcttttgggaatgttcccgaagtattacgctcaggtaaccatgttgcgatcacgcgttggcgtcgccagcagtcgctgctgcgcacttggttgcggcgaccagacctgatagatgaagcgagactgtcgaaagctgatcgcttactgcttgatgagattaagcgcacacatcctatggatacggatcaaaaagcgtcagtctcttggcgtggagtatagccattatgctaagatccggttcccttacgcagacctcgcattttttattttcattggtctgcgagctgatgtaatcatgtggtacaacccggtggctgcatcaacccacctgaacccgtcgtacgtaatgacacgtacacctacgaacgtatatccgtgcatccatgagtaagttgaataagtccattattgcagagttcgaatctgcccagatcacccgccaagtgccgcagttcagccagggtgacactatcgttgtcaacgtcaaagtgaaagaaggtaacagagagcgcttgcaagcttacgaaggcgtggttattgccaccaagaatgcaggccttaattccgctttcacggtacgtaagatctcgcatggttatggtgtcgagcgtgtgttccagacccatagtcccatcattgaatcgatagaaatcaagcgtcgcggtaaagtgcgcgctgctaagctttactacttgcgtggtttggaaggcaaagccgcccgcatcaaagaagacttggctgctaccgcccaggagaagctggcccgcaaaacagtcactgccaaagcaggataaatcttgttgggggggcggaaatgcagctccctttacatcacctgaagccgtttcttgcgcggaaatcgttcattcagcgatttaggataggatgcccttatggagcgtcgctcgctgcggagcggattggtgtctccggagttgcatgtctcatgccggtgtcgcttcggctggcgtgggtttactccgattcaaatcggcggagttccccatcgtttatcaagtgacaagatgcgatgtgtgtttctagcattgaaaaacgaatgcttatatcgcactcaatgacacatctccacgtcgatataagggattggtttttgtcctgctggatggtttttgcattctgatcgtttcagggcaccccatcgttgtaacgaataactagtcagagaaaacctttagattcaggatcggcgataatcccatggtggctgttaacctgaaaaccaaagaagagattgaacaaatgcgcatcgctggccgcttggctgctacggtgcttgatgtggtcgcgccatacgtgaagccgggtgtgactaccgcagaactcgaccagatctgccacgactatattgtgacggtacagggcgcgattccggctaaccttggctatcgcggctttcctaagacgatatgtacttcggtcaataatgtcatttgccatggtattcctagcgatgccaaggtcctgaaagacggcgacatcatcaatatcgacgtgactgtcatcaaggacggttggcatggcgatacaagtcgcatgtattacgtcggcaacccctcggtgatggcgcgccgactcgtggaaaccacttacgaggcaatgtggcgcggcatccgtgccgttaaacctggcgcgacgcttggtgacattggccacgccattcaaatctatgccgaaaacgaacgctttagcgttgtccgcgaatactgtggtcacggtatcggcaaggtctaccacgacaatccgcaggtactgcattacggtcgtcctggcgagggactggtactggaatcaggaatgacctttacaatcgagccaatgatcaatgaaggaacccgccaccataaggtattgcccgatggctggaccgtggttaccaaggatcgcaaactgtcagcgcagtgggaacatatgattgcagtcactgaagacggcgtggatgtgttgaccctatcgcctaacgacatcggcaatacataaacctcatgctgttccacgtgcccgcgtctgtggcatctggtgatggcggttgagcgatctgcttggcaagagtcggttgagattgatctccagtgcgcgtgccgtttcgaccaagacagcattgatggtctaccactgccacttgtgtgtcgcattgccccgttcattcgtcagagcttggttactgttgtatgtcaggaaacactgctttggtgcggaatgcggcacctccactggttgctaaaccagcaccaaggggtatgtttgagatgcccatggcagttgaacgcatcgggccagcacgtgagtttttccaaacaatgagttagcgcggctgtatgatgcagacaagcgcgtttgcgtttcgatgattgcaagccattagtgcagcgtttttactttgccgaggcatcgcgatccctgcacgtggaaaagataatgcaatgcttctatcgcagcacatcgaccctatctcggatcagtgattacttgctgcaacacgttgatgcaccctgcgatgagtgatgtgtgcatgatgcgtgtatcgtcaccttcggtgagcgtgctgaggatcagtgcccatcactgacgagcacgtccctccatcattcgaatcctccccgcagcacttgcatgatgcactgctgggtggcctccacatctcacatcttagccaggagcctctatgacaacccagccccaccttaaggaaaccccagcgcaacaggtggataacaaggcaccccctcctgtggataaggcacttgttagtccgattgaagatgccttcgcgcgttactccacactgaccgtggaagagatcgaagattcaatccgcccaaccgttaacagagtgatcgacggcctggaaactggcgcgtttcgtgttgctgagccggataatcacggtggctggaaggttaacgagtggctgaagaaagccgtattgctgtacttccgtgtccatgacaccatgatcgttgatgcccaacccgcccccttttgggacaaaattgaatcacgcttctctggttacgatgcagcgaagttccgcgctgccggagtgcgtgtcgtcccaggtgcgattgcacgacgtggtagctactttggtaaagatgtcgtgctgatgccaagcttcaccaacattggtgcctatgtgggtgaaggcaccatgatcgatacctgggcaaccgttggttcctgtgcacagcttggcgcccactgccatctttctggtggtgcggcgattggtggcgtactcgaaccattgcaagccagccccgccatcattgaagaccattgcttcatcggtgcccgctcagaaatagtggagggggtgattgtgggccaccatagcgtgatcagcatgggcgtctttattagccaaagtacccgcatttacaaccgtgccaccggtgaaatcagctatggttacgtgcccccgtacagcgtcgtggtgtctgggcaactccccgccaaagatggaacccactccctgtactgcgccgtgattgtcaagcaagtcgacgaaaaaacacgcgctaaaaccagtatcaatgaattgttgcgtggcttcgctgattgattggaatagtaactatgactacattgtatggattgaaaaactgcgatacctgtaagaaggcgaatcaatggctagatcgctttggcatcccctacgtattcgttgattaccgtgaaaatatcccagcaccggagatgttggttgcatgggcaaaagaagccggcggttttgaggcactgattaacaaatcgtcaaccacctggcgtcagttaccgagcagccgcaaaacgccgggtagccaagcagaatggaagttactactgcgcgaatatccacaattgatccggcggcccgtgctcattgccagtgacggtagcgtcagtcaagggtttagtgacaatggatttaagcagcgctttggagtggattgaaacaggcctgatcccatgcggcatactgctttatttaaaccctctgtccccagccccaacgtctgattcccatgagcgaagtgtttgacctgacctgtgatctgatctccaggccttccgtgacaccagaagatgccggctgccaagccatgattgcagcgcgtctagagcgtgtcggcttcacctgtgaacacctgcattacggttccgtcgccaacctatgggccacacatggacagggtgcgccggtgctagtgctactgggtcacacggatgtggtccctcccggtccaattgaagcgtggacttcggacccgtttatcccacagcgacgcgaaggcaagctctacggacgtggcgctgcggatatgaaaggcagtgtggctgcattcgtgattgctgccgagcgcttcttagtcgcccatgctgggcatcccggaaccttggcgatcttactgacctctgatgaagagggccaagcaatagatggtgtccgtaaagtggccgagacgttacgccagcgtggtcagggtattgattggtgcttgactggtgaaccgtcttcgagcaaacgactgggtgacctgctgcgggtcggccgtcgtggcagtttgtcggcaacgcttcacgtgaagggcgtccagggacatgttgcctatccccatcaagcacgcaaccccattcacctcgccgtacctgcgctcgctgcattgacggcgcggcattgggatgacggtgatgaatccttcccgtcaaccagcttgcagatcagcaatatccacgctggaaccggtgccaacaacgtgattcctggtgcactggaggttgctttcaatctgcgttacaacccgcattggagcgccccgcgcttggagagtgagattgtcgcattactcgatcaacacgggctggactataccttgcactggcatcgtagcggtgagccgttctataccccggaaggaaaattacgtcgcatcgcacgtgaagtattagagcgtttttccggcgcacctccggaagaaagcacgggcggcggcacgtccgatgcgcgttttattgccccactgggcgcgcaatgtattgagattggaccggtcaacgccagcattcaccaggttgatgagcatgtgtgcctggccgacttggaagccctgccagacctgtaccagttgctaattgagcggttgcttgctgaccattgatcctcaaatcgatcaggtattctatcggcgcgcgttctttcagaaaaagaacggtgtcagcgaaacaaaggcaagcagagtatctttgccgagcttcttgcgtcttcattgcactgcaacgatggcagactacgtgtcctcaggtgagcgttgcaccctgcatggccgcactttcaacagcgttggtagcaatgcttctcttgtggcttgcgtataccaatcatcatgcgtcctctatgtgggatgacaaccatgcgaaccaagcaacgtctaccgagcaacgcagccgcatgatttgatgttgtttttgtgatttagagtttctcagttccaccacctcgcacttggcgattcatcattgcagatcgccaaacaaacgcatattcaggagtgctttcgatgtgttccatttttggaatcttcaacctgcaacccagtgacaacctacagagactgcgtcaccaagcattggagtgctcgcaacggcaacggcatcgcggacccgattggagcggcgtttacgttgatgtgggtgcgattctggtgcacgaacgccttgctatcgtcgatccagccggcggcgcccagccactgctctccgaggatggcacgctggcgttggcggtcaacggcgaaatctataaccacgctgtactcaaaggaacattgcagcagccttatgtgttccaaactcattctgattgcgaagtgattaatgcgctttaccgcgaagaaactccaacctcgtttctgaatcgcttaaatgggatttttgcattcgcattatgggacaagaccaccggacgtggcctcatcgcacgcgatccaatgggtgtggtgccactgtactgggggcacgatcaggacggtcgcttacgcgtcgcgtcagagatgaaagcattgattgagcattgccccgacgttgcacaattcccacccggccattggtacgacaccacaacgggcacactggtgaagtattacgaacgctcctggaaaaactattctgcagtggaaggagtgcaggtctcactacaggaactgcgtgaagcgttcgagcgggccgtccatcgtcaactcatgaccgatgtgccatacggtgtactgctgtccggtggattggattcttccctggtggctgcggtggccgcacgctacgcacgccatcgcatcgaaaccaatgatcagagcgaagcatggtggccacgtctgcactcatttgcgattggactgaaagactcgccagatttgagtgcggccaacgtggctgccgaggcgttgaataccgtccaccatggtttcgagtacaccctccaggaggggctggatgttctacctgaagtgattcgtcacattgaaacttacgatgtcacgacgattcgcgcatccacgccaatgttcctgctggcacgtcgcattaaggcgatgggagtgaagatggtgctgtcaggtgaagggagcgatgaaatttttggcggttacctgtacttccacaaagcgccgaacgcacgtgagttccacgaagaattggtccgcaagctcaacgccctgtattactacgactgcttgcgtgccaacaaagcgatgatggcgtggggtgtcgagccgcgcgtgccgttcttggaccgtgaatttctcgatgtggctatgcggatggatgcgcagcataagatggtcgacaagaccagcgacggcccacagcagatggagaaaggcatcctgcgtgcagcgtttgacggctatttgccgccatcaatcctgtggcgacagaaggagcagttcagtgatggtgttggctacggttggatcgacggactgaaagcacacgctgaaacgcaagtgtctgaccatgcgctggcaactgccgagacacgtttccaggtgaaccctccccagaccaaagaagcctattactaccgcagcatatttgagcgcttcttcccaagcccggcggctgctgagacggtaccgggcggtaaatcaatcgcctgttcctcaccggcggcaattgcttgggatgccagcttcgccacaatggctgacccatccggtcgtgcagtcagcggggttcatcaacaagcactgctgtagtgaacgcggtagattggagactgtagtacctcacccaggcttggggtcacgctgcttctattgcgtctgtacacaggtgccgtaaacatcgggtggcgggttgaagcccgatgtatcggccttgttattgcgccacatattcggctcaaaatccgatcctttgcagttggcggcgtggtctaccccaatcgtgtaaatataagggcttttctgaaatatgttgtactcgaacacattcgcctggctcatactgttatcccagcacaacacctccggggtgcggtagcggattgagcaggtgagcaatacaccggattttttattgctgatgaactggttgtgtttgaatacattgcggcgtgcgtctgccagatataacccctgactgccgttgcgttccaagcgatttccgcggatctcactgtcttccagatgctccgtggtgatcccagcagcaacgttgtcgtgaatcacgttattgaccaaacggacatgagtgctgcgattgaatgacactccatcccaggttgcgccggacacatcgttacgttcgatattcagcgtgtggctgtcgtactcactgagcagacaggcactgcggcactggctgactttgagatctaaaagactgacattgtgtgcagcacgtaataccaccacgctgttactcaaatatggcctttctggcatgaattcgtgttcgacattggtcgtgccgatcaagtgcatacgttcgatcactacatcgccaatctgtttcgcaggttgctgattctgatagtcaccaatcacgatcaatggttgttgtacatctttattgagacgaatcaccgtccttgcgccactgccacgtatgtgcactccatcgcggccaatatgcagtaacttgtctacccggtactcgcccttatttagacacagtaccgctggatgcgcatcgctgcgtaacgtatcaatggcttgctgtagatcttggccaggtgcaacccatgcactacagggcggttgcatgtttgctttggcatgagtggcaatgagtaatagcgccaggatgagagtacaaatggagaggatgcgctgagacatgtcggctcctaagcaaatttaagttgagaaacggcgcgcataagtgcggctggttttagaaaccttagtgtcgcccagcgatcaaatgataaaccctatcatgggagacatagtttgacggagattcattgatgtaaggtccctgtgaaatttaaatttttttatagccaaaaataacggatgtcatccataagtcatgtgttgtggttgaaagcgtcgggagtacttctccgacaatcagagctatggatcaaataactcaaacatagtcgtttgggatggccgtctatccaggtgctttactgtgaataccatccttatacagtgtctaattacttaggcagtgcctgatgctgcgtcgcacatagcgcaatgtaagcgcttgaaccttcttaatctgggcacaccatgatcattgttagcatgggtgtagcagcgtgatgcatgcatatagggtgttggaaccattgctactaagggtgtcattacaccgggttcacagcgccgctcaatacgttgagatagtcataaggtgtgccgcaagtgccatacagttcacgacgtgtgagactgtttgaagtatctgtgttgaatcttcacaggtgaaaatacgttttccagtgcttatgtcgtgtttgcttcactgaccgatgtgtttttgtcatcggtggacatgtaaacgtgcgttgaaactgtcggcgcgaatggtacaaatatctcacgtcaccttgttctaaacgccgtgtaagacgtgtgtgtgattcttttcaagaagatgtcttgtggaaaaacacaatcaggtatgagttgggcactgctccaggacacccatcattgcaatgttgcctgtgtcatacgtcgcactgtgattcatccgcagcagccattgatagtcatccagtcatgatatgggtgagggggctattgctgggcaggtgaatcctaaagtgtatatttctaatatcgtagagtcatgtcttcggacattgggacaatgcttttaatagattgagatgcaggcgtgaagatcaattccaacctttttgattgcttgttgccgattgttgctgcaccgatggccggtgggccaaccactgttgctctggcgcaggccgtgagtggtgtcggaggcttcccattccttgccgccgggtataaatccgtcgaggcgcttgcgactgagatcgctgtgttacgagcgagtggcggtgattttggggtcaacctgttcgttccctcgccggacatggtggatgcggaggcattcagcatctacgcagccaaactacagtctgaagctctgccgtatgggctttgtctcgatccgctaccggtgatgggtgatgatgatggctggccggataagctggcgttgttactgaacgatccggtgccggttgtatcgtttacgtttggattgcccgcggtgcgggacattgccgcgctccgatgtgctggaagccgggtactggcaagtgtcaccttgcctgcggaggcgcaggcagcgatggaagcgggtgttgatggattggttgtgcagggtcccgatgctggagggcacagcgcgacgtatgatcctgggcgtccattcacgccattgaagacggtcagcttagtacgtcgcgtgtgtgctgtgagcaggttgccggtgattgcggcaggtggtgtggatggccccgtgatggtccgcgcgttgttgcaagcaggcgctgttgcggttgcgatcggcacgctgctgctgcgtaccaaggagtcaggggcgacgcaggtgcataaggacgctttggcgaatcctgcgtatacggagacagcaatcactcacgcgtttactggtcgtcctgcccgaacgctgcgtaatgggttcgttaatcgctatcatgcgtcggctccgttgggatatcccgcgatacatcatctgacccgtccgctacgacaggcggcggcgagtgcgggagatgccgatgtgctgcatctttgggctggaactggataccgccaagccatggatggttccgccgttgacgtgattcgatatttggctgctggattgtgagcagtaagcatggatgaatgatgtttccaacaagcagggcaaacatcacaatgcgtttatcaatggatcgtatgacggaggcattcactgatgtgccacgttatcggcgttttcccgctgatcctgcgtgatgaagcttagatcgataacgatgcttttactcactgagtgtatgacgaggcttgctattgatcatggtgctcagtgtgacgcatccatcgatattccaggtttgtgatgaagaggcgtcacgggctgctattgccaaagggtgcgttgttggtgccgctgtcatatcagagggttgctcccatcactggcatagagttgtgatgggggatgtttatgtatcgtcagcacgatgtgcagcagtacttgaatgctgtgctggatctggctgtatgggcttacatgtgccgcttgctagggaggttgcttgtgtctcttgtgcttattagtaataatactaattatgagtttgagcgatattcagcaggcaatcctgtcattgattaccaaccacatcaacgctgatggcgtttctccttcgcagacggagatcgcgcgtgcattcggcttcaaaggggttcgcgcggtgcagcatcaccttgatgtgttggagcaacaggggatgattcgccgcgtccctagacaggcgcgtggcatccggttgaagcatcttactgaggtggatgagactgcgttagctttgcagagtgaggatgtgttgcgcttgccagtgctcggccgtgttgcggctggtcagccgatcggtgctgatatcggtgagggtcgcgtggtgttgttggatcgggtgttcttctccccagcaccggattatctgttgagggtgcaaggtgattcgatgcgcgatgaaggaattttcgatggtgatttgatcggcgtacatcgtacgcaggatgcgcattctggacaaattgtggtggcgcgcattgatgatgagattaccgtcaaattgctgaagatcagtaaagaccggattcgtttgctaccgcgtaatcctgactttgcaccgattgaggtgaggtcagatcaagatttcgccattgagggattgtattgcggtttgctgcgccccaaccggtgacgcgatgttcttaattcacgccgtgtctttttctgaggttgtcacacgggtgatgtcgtgatacctggcctgccttcgcagtttaagctgatgaggccatcaatttttcatcatacgtaatgcgtgatcgttggaccttccacatcatgtttctattaatactaataagaggatcgcttggatggatgagaacaagaaacgcgccctttctgtcgctttaagccagattgaaaaacagttcggcaaggggtccgtgatgcggatgggcgatcgcgtgatcgaggccgtagaggcgatcccgacaggttcgctcatgttggatctggccctggggatcggtggtttgccaaagggacgtgtcgtggaaatctatgggccggaatcttctgggaagaccacattgactttgcaggcgatcgctcaatgccagaagaagggaggtacagcagcgttcattgatgctgagcatgccttggatccgatttatgcgggcaagttaggcgtcaatgttgatgatttgttgttgtctcagccagatactggggagcaggctctggaaatcgctgacatgctggtgcgctcggggtcgatcgatatcatggtcattgattcggttgcggcactcacgccaagggcggagattgagggtgagatgggagatcagttgcccggtcttcaggcgcgcttgatgagccaggcactgcgtaaattgaccggcaatatcaagcgctctaatacgctggtgatctttatcaaccagttgcgtatgaaaattggggtcatgatgccgggtcaaagccctgaaactacgacagggggtaatgcgctgaagttctatgcttcagtgcgtttggatattcgccgtattggcgcgatcaagaagggtgacgaaattatcgggaatcaaaccaaaatcaaggttgttaaaaacaagttggcgcctcccttcaaacaagtcgtgactgagattctctatggtgaaggcatcagtcgtgaaggggaattgattgagatgggcgtggaggccaagttggttgagaaagccggcgcttggtatagctacggtggtgagcggatcgggcaaggaaaagataatgcgcgcggctatctacgtgaaaacccgcatcttgcggccaagcttgaggctgatttgcgtgagaaatttgagccgaccgagctttctcgagaagagggcgatgaagatacgctcgaagatacaatgtaatcattgccgatgacagcgcgagttgtgttgctgtttctcgtggtgatgctccgatgtcagtgcaaaatgcggcgacgcggagcatgacggacgcattcggatcgtgcatgagggaggatgaggattcggctattccgtgtcgtgtttgaaagcgctgctgcaaaccgttgtctatccgcgccacgctgtggcgcatgattgcatgcttgctctcttttctctcctggggttggtgctataaggagacgaattgcaacatgccgtgcatctgatgtggcccccgtttccgtcatgactgagtgatatctatagtgataagggcacactttcgtttgctttgttgctccggtctggtttctggatttcggcgatttgctgcgttgttgcctataacgcagaggattgaatgtccaatgcctgttacccttaattgatctaagaccatatcctcattccgtgaggttggcgcgtttacagtgccagcctactgttaactccatgaacatacctaccaaattcaccacttcaaagattcgtagcgattttctagaatttttcaagaataaaggccacaaaatcgtgccttccgcgccgttggttccaggcaacgatccgaccttgctgttcactaattccgggatggtccagttcaaggacgtgtttctaggggcagagaagcgcagtgaggtccgtgtggctgatgtgcaatgctgcttacgtgccggtggtaagcacaacgacctggattcggttggttacacagcacgtcatcacactttctttgagatgctcggtaattggtcgtttggtgattattttaagaaggaagcgatcacgtgggcctgggagttgctgacccatgtttgggagttgccccccgaacgtctgttggtgacggtgtaccacactgacgatgagtcctacgcattgtggcgtgacatggtcggggtgccggaagatcgaatcgtccgtattggcgataacaaaggtgcgccgtttgcctcggataatttctggcaaatggccgataccggcccgtgtggtccatgcaccgagatcttctacgatcatggggagcacatcccaggcggtcctcctggttccccggatgaagatggagatcgtttcattgagatatggaatttggtattcatgcagtttgatcgtcagtctgacggtacgttggtgcctctgccggcaccctgtgtggatacagggatgggcttggagcgtttggcggcgatcctgcagcatgtacacactaattatgagattgatttatttcagaccctgatcctcaaggccgccgaattaactgctgttgcggatgtgcagaataaatcgttgcgcgtgattgctgatcatagtcgtgcgtgcgcatttttgatcgtcgatggggtgcttccgtccaatgaaggccgcggttatgtcttacgtcggatcatccgccgtgcgctgcgtcatggttggatgttgggtgtacgtcaaccgttcttcaacaacatggtgcccaccttggttgcggtgatgggcgatgcttatcccaagctacaggctgcagctgaatcggtgatgcgtactctcctggctgaggaagagcgttttgccgagaccttggatgtcgggatgaagatctttaacgaagtggctgccaaggttgccaatggtgtgatcccgggcagcgatgcgttccgtttatacgatacctatggttttcctgttgatctgaccgctgatattgcgcgtgagcgtggtatgagcgtggacatggtcggtttcgaagccgcaatgacgcaacagcgcaagactgcgcgcgccgcgggtaagtttgggcgcggcgtgcaattgtcggctgaacgggctgcgatgttgtcacccacggtgttcctgggctatgagcagcttcaggccgatggcctgagagtggttgcgttgttgtctgatggtggactaactgattcggcgtcggtgggtgatgaggtgattgtgttgaccgaccgtacacctttttacgctgagtctggtggtcaagtgggtgatattggaacgttgatggcatccgacggagtgcgtctggaggtgactgatacgcaaaagttaatgggtcagttccacggacatgttgctcgtattgtgcaaggtggtgtgaaggtcggcgatgtgttgtccggtagcgttgctgttgccagacgaaaaatggttgctcttaaccattcagccactcacctgttgcactgcgcgctgcgcagcgtgtttggtactcacgtggtgcaaaaaggttctttggttgcgccggatcgcctgcgtttcgacttttcacattttgagcctatcgcggctgcacaaatgacattaattgaacggatggtcaacgatgaggtgcgtgctaatcatctggtgatgatcgagcagatggggatgcaggctgcgttggatgctggcgcgatggcgctatttggagagaaatatggagagcatgtgcgcgtagtaacgatgggcacttcggtcgaactctgcggtggtacccatatcaatcgtacgggtgacattggtttgtttaagatcatttccgagtgtggcgtgtcctctggagtgcgtcgtattgaggcggtgacgggcgaaagcgcgttaaatcatgtgttggccgaagagcatcgtttgtacgaagtcgctggccttattggtagtaacgcgaacgacgtggtcaatcatattcgccaactcactgatcgtcagaagacattggagcgtgaactcgagaagctcaaaggaaagctgatctcgggaactattaccgatttgctcagcacagcggtcaatgtggccgatgtaaaagtagtcgccgcgcgtcttgatggtttggatgggaaggcgctacgtgaggcgcttgatcgacttaaattgcagctgagtgatgccgtcatagtccttgcgggagtgactggcggcaaggtggctttggtgactgccgtcaatggtcgtcgcgcaatgggtaaggtgaaggccgatacattactttcgcacgttgctactcaaatcaacggcagggggggggggcgtgttgattttgctcagggcggcggtgaggatggaccttctcttcgttccgctcttgacggtgttgctacgtgggtcaagcagcatctgaactgaatgttgctttcgttgcaccttgattgacggaggagggacccgttaccatcttcgctcgatcaagattagtgtaggtcggttctgttgtggaccgttcattctggctgataagatttcggccctttggagattattaaaatgttgatcctgactcgtcgttctggtgaaacgttgatgataggtgatcaggtcaccgtaacggtgcttggtgtaaaaggtaaccaagtgcgtgttggtatcaatgctcctaagcatgtcgcagtgcatcgtgaagagatttatcatcgtatccagcgtggtgacgagcttgcgtgttcttctggaacgcggggagatagcggctcttcaatataattaaaatggtgtttgcgtcgttttgggttggcaggtatccttcacaaccctatccgcctaaagaggtggttagtaccccggagtgatgcccgagaggccgaaggggctcccctgctaagggagtatagggtcaaaaactctatcgagggttcgaatccctctcactccgccacctattggcaagtgctttgtgctcaatacccttagattgggtgtttaaattccttatgtttatatttgggatgcctctttaagtgcttcgtatgtggaagcttttataaatcctctttgctatggcgatgttcataggttccgtggattcatttctatctagtattttagagttctgttcaatagcggcctaaagcggttctttagatggtgtcgttgcttctataccctgtggtcagtgaggttttctgaagtgactcctgattggccattgtttctatcagcactcttgaaatcccgtttcgtaggctgacttgatggaatctcaaagcggtgttgtggttgaattggtttactcagatagagcatagagcaaccaacatcatttctcgtttatacgtgagtattgcgtggtgcttctttggttccgtgttctctatgattaagcatatgctagtgagtcggcattttattgaatatttaaattcgcattggagatgttggttattttgatgcggtttatttttggtatctaatctacgttgctaacaaacagccagcagaaagaattttttgaaatgccttatgcttgaatttgaaatcttcaaaaaataatttggcagttcctgtgattgtttgttcttttcctacttttgcatttaaaaatacaatgcacgttgtcatcattgggttttaagtgcgtcacgcggatgtgtgacgttcttacaggtagccggagtagtccgaatacaagtggcacagtgtctcgatggtgctgcctgtgccgatttcaaatagacgatgaaggacgtacagtgcacctaattttgttgcaggcgcctgtgtatacatgaaaacgaagtattaatgcttttaacgcgttatgccgcagcacatagggctgcggctctgaaaaaatggtccgtggttgttcaatacctattctgtcatcccgttgcgcttcagcaaggcatcaatgcgaggcgcgcgtttgcggaaggcctggaaattctctgctgcgctgcgactgccgccacgacttaggatttcgtcgagaaagcgcgcccctatttcggcaaattgatccggagcctcttcaaatgcagcataagcgtctgcgctgaggacttcggcccatttataactgtagtatcccgctgcataaccaccagcaaaaatatgtctgaactggtgcggaaaacgattccagtccggtaaccggttgacggccacttcatcacggacccgttctaacagccccagtacgctgtcctgtgctggatcgaagtcactatgtagcagcatgtcgaatagcgcgaactcaagttggcgcacggtgaacattccgctctgaaaattgcgcgcgtagaccatccgatcgaacagactgcgtggcagcggtgcaccggtctccacgtgtgccgtcatggcttgaacgcgctcccactcccagcaaaagttttccatgaactgactgggcaactccaccgcatcccattccacaccattaataccagccacgcccagttccccaatccgggtcagtaattgatgcagcccatggcccatttcgtgaaataaagtaatgacctcctgatgacgcaacgtagggagcacaccgtcactaccacggccgaaattgcacaccaaatagaccaccggagtttgcacctcatcgcctttgtcacggcggttacggcaatcatccatccatgccccgccgcgcttgccctcccgtgcatacagatccagataaaactggccgacgcgttgcccattcgtatcaatgagacggtagaagcgaacatctggatgccagaccggcgctgcgtcttcttcgatccgcagtccataaagggagtggatcacctcgaacaacccagtcaggaccttgggttcggtgaaatactgctttacttcctgctcggagaaactgtaacgggcttgtttgagcttctcgctggcatatgcaatgtcccaggcttccagcgtctcaagccccagcgcctcgcgtgcgaacgtttccagttcacggcgatcatgttgcgcatgcggcttggcacgtcctgccaagtcatgcaggaagctgagtacctcagccggatcctctgccatcttggttgcgaccgagtatgccgcgtaacaggagaaaccaagcagcgcggccaattcggaacgcagcgtgaggatctgatgaatgtgcggactattgtccaacgcagcatcgccaaattccgaagcgcgtatcgcactagcatgatatgagcgctctcgtaacgtgcggtcgtcagcatcgctttggaccgacagatagcaaggcatctgtaacgtgaacgtccagcctggtacccccttcttttctgcggtggcacgcgcggtagcgacagtctctgccggcagaccggataacacagcggcgtcttcggtggtgtaggaccatgcttctgtcgcatcaagcacattttgcgaaaacgttgcagacaatgccgaaagctcctgcttgatctctgccagacgggctttcccggcggcatccagctcggcaccgccgagacggaaatcacgcaaagcgttatcaacaaccttgcaccgtaccgcgttatcacggtcccattccggcgcacacgctaatgctttgtactgcgcatacagcgccaggttctgtccgagcgtactgctgaatcgggtgactttcgggagagtgacgttatacgcctcacgcagcgccggcgtgttgaccaccgcctccaaatgcgccacctgaccccacgcgcgatacaaccgctcggtggcatcgtccagcggtactacgcagttctcccatgtcaccggcgtcacctgttccgcgtgggcgacggccgcctccgcctctgcgagcaactgctcaatggccggcccaacgtgctcagggaggatcgcgtcgaagcgaggaaggtctgagaaatcgaggagtgggttactcatgtgtgtcttctgtgtcttgggaatgcagccaaatgcggagatgcctaccgattatggtgtcatcccagagccgcgcaaggaagcagtggcaacgtatcacccgccacgacagcagcgatcatcgcgtcactgtcggatacatcaatgccatgtgccgcgtaccacgctggagaatagtaactatgcgcgtaacgttcacctccatcacacagaatggtgacgatcgaacccttcatgccttcagcccgcatgcgtgctgcggtttgcagcacacccaccatattggttccagtggagccgcccacacgtcgacctaagcgagcgctgatatagcgcattgccgccagactcagcgcgtcgggcaccttaatcatcgcgtcgatacaatcgtggatgaagcttggttctaagcgtggtcggccgatcccttccacccgagatccccccgtgtcagtgacgttgttcctatgatcgcttcccttgcatgcagcgcggtagtgatcgaagaacaccgaaatctccggatcagcgcacaggatgcgggtgacgtgacgccggtagcgcacatagcggccgagcgttgcagcagtgcctcccgtccccggactgcacacaatccaggaggggattgggtgtggctcatcggccatctgcttaaagatcgactcagcaatattgttattggcgcgccaatcagtcgcacgttccgcgtaagtgaactggtccatgaaatggccccctgtctcacgcgccaactgatgtgcagcatcatgcagatcacacgcccgttcgaccgcgtgacagcgccccccgtgaaactcgatcgcagccaccttctccggtgaggtcgaggttgggatcaccgcgataaaaggaagccccaacagcctcgcgaagtaagcctctgagacagccgttgaaccgctggatgcttcaatcaccggccgccctggagacagccaaccgttgaccagagcgtacaagaacaacgaacgtgccaatcgatgcttaaggcttccagtggggtggatcgattcgtctttgagatagaaatcgatgtccgggaaaccaggcaactgcaacgggatgagatgggtgtcaacggagcgattaaaatcagcttcgatcttacagatggaggatgcgacccactcgcgctgcgacataaaagagcaacagtgatagaaagcgtcgattctcccatagccaccttgcaccctctgagcacccattgagtgtttcgcgacgtgttgggcttttttatgacccacccatttgcatctgcaggtcagcgcgtgccgccttgcagcattcgccttaccacatcaaggcacgcaaaaaatgagcgtatccctaccgtgttgcaagcggtacaaaatcacgtgatcccaagtccaatgcttgcaatgagttacttccgcactcctgactagaaacctctgctgcttgccttccatccccagcccgatgcgagacctctccctgaacgatgctactgcactgcccaccctgaccggcagtgcccatccgatggcagcacctcctgattgaacaggccccccgcgtccttggcatcgccatctggcgcgcttgtaaaaatgggctgaccctttgcatctgcaggcatcaatcttcgcgtgtcatcaccgtatactgatgccacttcacgactgcgttgtgctcccttgccgtctttactactacgtctgttgatcagcctttgcttgattgctcagcagtctgtgagtgcttgggcgtcggtcacgatgcccccaaggattgccctgccttctatgcctgtcgccgtggtcgacatgccctgccatcatcgcggcgtttctggcgttcagagtgcagcacacctcagccatgccatacccacaccctcaaccccatgcagcaaaatcggtcattgtgactgcttacagcacagcaacgccctgccggtgacgctcctcatcctgccggtcgtgttgctggagcgtctgcccccgcttgccggaatactgactagccagggactccccgcaccctatcgtcccatgcggcctcccattgcctgagtccctgagggatgttgcctgtccctcatagcgcacctcttccgtattccccttgcttgctatcgttccgtcgccaaagcgccggacatgggagtctctatgaacactgttcccttcccttcccagggaggcattgaccggcgtcgcttcctacaaggcttggcgttgggaggcgtcgccgccggtaccggcttatggcgtcttcctgtccatgcagccaaccctgagttgccgccactgcagcggcgtaccactcccctagagctgcgtatcggccagtccagcgttaatttcaccggacggatgcgtccagccatcaccgttaataacagcctgcccggacccgtattgcgctggcgccaaggcgatacggtccaaatacatgtcaccaataccttgcccgatgtgatgacctcaattcattggcacggcatcgttctgccctccaacatggatggcgtaccggggatgagtttcgacggcattgcaccaggcgaacactatctataccgctttcagttacaccaatctgggacctactggtaccacagccacgccatgtttcaagaacaggccggcctgtatggagcgttgattattgatccactggagccgcccccctaccgcgccgaccgcgagcacatcctcctgttctcagattggacggacctggaccctgccgcactgtttcgcagactcaaaaaaatgtcctcttacgacaacacctaccaacgcaccgtccgcgatttcttccatgacatacgccgtgatggcttgcgcaccacactggccgaccgccgcatgtggggcagaatgcggatgaccccgacagacctgtccgatgtcaatgcccatacctatacctacctgctgaacggcaccacgccagccggcgcctggactggattgttccgccctggagaaaaagtgctattacggctgattaatggttcggcgatgacctattttgacgtccgtattccaggcctaaaactgaccgttgtcgctgtggatggccaatacgtccatccggtgaccgtggatgaattacgtattgccctcgccgaaacctatgatgtcctgatccaaccccacggccaggatgcctttgcaatctttgcccaggacatgggccgcaccggctacgcctgcggcaccctcgccgtgcgtcctggcttacacgcccccctgccggcattggacccgcgtcctcgcctgacaatgcaggacatgggacacgggatggcacatggtcagcatgggagtcgcgcctctgaaatggccgacatgccaggaatgacccatcccggcagactgggcgatcatgccagccacgccagccagcctcccgcgcagaccatccctcatggttcacatagccttccggcggacagaacagcgccgcggcatcctgccagcgaacagaacaatcccttggtggagatgcatgtggacgcaccacagccgcttttgaatgatcccggcattggcttgcgtgacaatggccgccacgtcttgacgtacgctgatctgcatagcctgttcgatgatccggatggacgtgaacccggacgtgagatcgaattacatctcaccggccatatggagaaattcgcctggtcgtttgatggcatcccatttgcctccgcgcaacccttacgactcaactacggtgaacgtgtacgcatcgtcttggtgaatgacaccatgatggcgcaccccattcacctgcacggcttatggagtgacttagaggacgccaacgccgcgtttcaggtccgtaaacacaccatcgatatgccgccgggtacacgtcgcagctaccgtgtgcgtgccgatgcactggggcgctgggcctaccactgccacatgctgtaccacatggaaagcggcatgatgcgtgaagtacaggtgcgcccatgaacacccgtacctggttcgtattgctctgcctcgctctgcctctcgtatcgctgcaagcgcagccgcacccgcagaccgaacagacatcaccggcattgagtgagcacaccgagatggaccacaccgagatgaaccacaccgagatggatcacaccgagatggatcacaccgagatggaccacaccgagatggaccacacccagatggaccacacccagatggaccacacccagatggatcacgcaatccacggtgcaacaacgcaattcgctggagatggctccttaccccctcccagcgcggcggcgttggcagcggcgtttcctccgttacgccaccgtgctgcgcacgcgccacccctggtgtctctggtccgtattgatcggttggaaacgtggaatgctgatcccgggcgcggccacgcttgggcaacgcaggcatggattggcagcgacattcaacggctgtggttacgtagccaaggtgagtgttacggtggccgatgccaatccgtcgcagtggagatgctgtatgggcatgatatttcgccctggtgggatgctctcatcggcgcgcgccgcgatgtgcagccggatggccgcacctgggcggcgcttggtgtgcagggcgtggcaccatataaatttgagagtgccgcgtttctgtatctgagcggtgctgcgatgcggctcatggtggagactaaatatgacctgctactcagtcagcggttgatcctgcaaccgagcctccaagcgaccgctggtcttactcgggatcgcgatctgggggctggaccccaaacgttacaggttgggatccggatgcgttaccagattacccggcgtgttgcaccgtatgtgggttgggagcgcgaatatggttatggggagagtgggcgccaggcacgcgcgcgtggtacgtctgaccatgaaaagcgctgggtagctggcatacgctgctggttttgaacgctcctgcccagtgacgcaccacaaccgatgacgtgctttagatcgcgtgatggattgcatcatggaacgtgctcatctcagcggcgtgaagcctggatgcttgaatgggcagaacgtgatgcgacgtgttgtttaggagttgttttagagcgggagatttcccgctctgcttaaagcgcatcttggggtgagaacacggcacctgcggtgttgcggaactgtttgcaatatcaacaccgtatcccccgtcggctcatagtgtggcgcgtcgttcgcgtagcccgttgagttgtgtcgtccactccgtgaggcggctgcgttcttgctcgactaccgccgcaggggcgttttgcacaaagacggcgttactcaatttcccgttgcttttatcgatttcgctttcgacacgtttgatttctttatccaggcgcacgcgctcggcatccacatcgatcaacccttccagcggcaccagcagttttaacgtgccaacaatggctgtcgccgatggtggcgcggcgctatcggcgcccagccagtcaatgtgttcgagtttgagcaaaaagtgcaatgcagtggcgaaatgcgtgatacgacggcgatcaacttcctggtctccttggagcaggagggacacacgccgcgaaggtggcacgttgagggtgctgcgtatccggcgcaatgcgctgaccatgatttttagccattcgacatcggcggcggcgttggcgaaggccgcggtctctagctgctgtggctgtggataggggcgcagcatcagcgttgttgcttggatgcccaggcgcggcgccacctggcgccagagttcttccgtgataaacgggatgagcggatgcagcagacgcagcagggtttctaacacgtacagcagggtgtgacgggtgctggcggcggcctgggtgtcatcgctattgagtgcgggtttggccagttcgacgaaccaatcacaaaattcgttccacgcaaattcgtacaaggcctgcgccaataaatcgaagcggtacgcggcaaattgcgcatgtgcttctgcggtgatggcggtcagccgcgagagaatccattgttcggcgtcggtgcgcggttgcggagtgcggggtgcgtcctgcccgtcttggcccgcctggtgttgcgcgggtgagtgggcggtgtcgtctgcggtgttcatcagcacaaaacgggtggcgttccacagtttgttgcagaagtttttgtacccttcggcgcggccaaggtcgaatttaatatcgcgcccgtgggttgctagtgccgcgatggtgaagcgcaacgcatcggccccgtgcggggcgatgccctcaggaaattctttgcgtgtggctttggcgattttttcggcaagcttgggttgcatcagtccggtggtgcgcttggcgaccaggtcatccagggtaatgccgtcgatgatgtccagcgggtcgagcacgttgcctttggatttggacattttctggccttgggcatcgcgaatcaggccggtgatgtacacatcgtggaatggcacgtttccggtgaaatggtcggtggccatgatcatgcgggccacccagaagaaaataatgtcgaatccggtgaccaacaccgatgaaggcaaatagcgcgcgtagccgtgttcggccatggccgttggatcgggccaccccagggtggagaagggccacagttgcgaggagaaccaggtttccaatacatcgttgtcctgggtgagtgtcacctcggggccgagggcgtgtttggcacggacttctgcttcactgcggccgacatagacgcctccctgcgtgtcgaaccaggccgggatacggtggccccaccacagttggcggctgatgcaccagtcttggatgttctccatccagtggcggtaggtgttgatccagtttggcgggacgaatgtcacggcgccgcgctcgacaagcgctaatccacgtgcggcgagcgtctccatctttacaaaccattgcgctgtgagatagggttcaattacctggccggtgcggtcgccacgcggtacttgcaaggtatgtggtatcgccgcgacgagcaggccttgtgcatccaaatcggccaatatctgtttgcgtgctgcgtagcggtccaggcccgccaaatgcgctggcatgaccagggtgtcatgttgattggcggcgctgctggcctctggatcgctgggggtgttcgttgtgtcgctggtggcaccggagggcatgccggattggatgcttgttttggagacaatgcacgcggcatcgtccagcacctggatcatgggtaagcgatgccgtaggccgatttgatagtcgttgaagtcgtgcgccggggtgactttgacaacgccagtgccgaatgtggggtcgacataggcgtcgccgatcaccgggatgtggcgtccggtcagcggcaatgtcacggttttaccaatcaatgctgtgtagcgccggtcctcaggatgcaccattactgcggtgtcgccgagcagggtttccggacgggtggtggccacgatgagggagtcgcgggtctcgcgcaggatttcattccctgcggcatcatgctcgacgtgttcgtaggtgacgccgtcgctcagtggatagcggatcgaccacagcatgccttcttctgcgacattctccacttccaaatcagagatggcggttttcagcaccgggtcccaattgaccagacgctggccgcggtaaatcaaccctgcttcgtaccagcgtacaaacgcttctgtcaccgccgccgatggctgcgggtccatggtgaaggtgctgcgtgaccagtcggcggagacgccgaggcggcgcatttgccgttcgatggtgtccccggattgctgtttccactcccacactttgttgataaagccgtcgcggcccagcgagtcgcgggtttctccgtggccttcgagcaccacattccggctgaccaccatttcggtggcgataccggcatggtcggtgcccacttgccatagggtgtcatctccacacatacggtgatagcgcaccagcgcatccatcaaggtttgttggaaggcatggcccatatgcagggtgccggtgacattcggcggcggcagcaggatggtatagggctggccggtgccggatggtttgaagtggcctgcagcttcccaggcggcgtataagcgcgcttcaaaagaggtggggtcatagctggaggtgaactgggacatggcaggggccgcagatggggagagaagacagggagcaggggcggggtgattagttctgacgcctggtgagattttggattttctggtctgtctcgtattggtttaatgcgtagaccgcccagatggcggcgggggcccatccgatgaccgtaagttgcaatatcaggcagagcacaccggcgaacggacgcccgatggtgaagaacagtagacagggcaacaggagagcaatgagtaagcgcatggttggggttcctttcttaaaggggtgggtggcagggcggcggtcacatgtcgtgtttgttcatgtgcaggccgcgtgccttgtagtgtttccagcgttcacgcagtggctcgcgtgccgcgggatcagcgggaaccacctccaacacgcgttcgcaggggccgtcccaaggggcgtcgcgtaggttgatgaccagcgggcgcgatggcgtgtcgctgtccggggtagcaatcaatacgggggtgatgtcgtcgtcttcgtcgctgccggcgatttggtgggggatgtaggcgtccgggtcgaacgcccacagtaggtcatccagtgcttcggcctgggcttggtcgcgggccagaatcagcgtgggctgattagtgtcgtaggctttgcggaccaatgcgcagaccaactccagtggttgctgtagaaagcgcggtttggcaatcaaatagaagtcggcgcgtgccattaatcgagtttctcgagcatggcacgtagccgttcggtggctttctgagggtccaacttgattttcagttgtcgtcttaattcaattaaagcgccaagggacaaccctaggaatgcactcgcagtgaaatgcagcagatagttaatgattcgaatgattagagtggtatttgaagcattgatcagtgcgatgttgatcatggtgaagctgcatacgaagtatatgaggcattcaacggcttctttggtgaagggcaatggattgaagggttgggaagcaatggtttcgatctcatccagtgctttcttgataatttgtttcttggtttgttcctttttggcttttctgatctttagccaagccgaaatacgtttcacgataaaagttaggagaagtcccaataagggacttcccataccgtagatatgcatcaatgcgtggtcgcttagcatcggtccacgagccactgtgtcagtaggccgacaggacgcccggtggccatgccgcgtttgccttcgttgctggctgagccggcaatatccaggtgtgcccagcgttggccttcggtaaagcgcgataagaagcagccggcagtgatggcgcctccccagcggccgccgatgttgtagacgtcggcaaacgtggagtccagcaagttttggtattcgtcccacaggggcagacgccaggcgcggtcgtggacgtgttcgccggcggtcagcagttcgttggcaagatcgtcatggtgagtcatcaggccggtggcggcgcgcccgagggcgatcatgcaggcgccggtgagggtggcgacgtcgatcagtgcttccggcttgaagcgttcggcgtaggtcagagcatcacagaggatgaggcggccttctgcgtcggtgttgccgacttcgatggttttgccggacatgctggtaatcacgtccgaggggcggtaggcgttgccatcaatggcgttttctaccgccggtacgatcacaatcaggttgaggggtagccgtactttgactgcggcgacgaaggtgccaatgaccgccgcgccgccgcacatgtcgtacttcatctcttcaatgccgccctgggtcttcaagttgacgccgccggtatcgaaggtgatgcctttaccgacgaggacataggggcgggcgtcaccgccgccgttccacttcagcacaatcaggcgggggcggttggctgagccacgggccacggcaagcagtgcgcccatgcccaatgcctccatcttggattcgtccaggatttcgcatgttgcaccagggtgtgtggcggcaaagtgggctgtggtttctgccagatagacaggggtgcagatgttcggcggcaggttgcctagggcacgtgcgtactccacgccttcagcgatggcttgacctagtgtcagtccgctgctctcttgaccgtggatcgccagggtgatgaggccggattctgcggcttttttgcggctggtccctagggtggcggtgtagcggtaggcggcgtggtcagcggcgatcacggcttggtggatgttccaggcggcgttgcgatctttgacggggagttcagataaggtgagtagggcgtgcgtcactggggcatctttcagggcgcggacggcgtcgccaacggctttgatgtactgtccggggccgaatttatccgcttcacctaagcccaccaccaagacacggggtgcggtgacaccgttcaggtcgtggagtaacgcggaggtgccagatttgccggtgaggtcgccgcgtgctgtcaatgcggtgatgcggccgccgctggcggcgtctagagtttttgcggtgggcgagagtgtcttgtcagcatagatgccgacgatcacgcaatcggtggtgacagtctgtggtgtggtttggttgagctggaattggagggccatgagattcagattcctgttgcgagtccttacaatcgcggaatttgtcgccgcctgggttatcttggcggctgccgcgaacgagcttacaagtctaaagcaaccacattctatgccgaagctagaccgctatctgttgagcgattttactcagagtttcattgcaactttgattgtgctgatgctggttggggtgggtggtgtgttggtcgatattctggggagcattgccgatggccattttccggccaagctgctgttgtcccagcttggcctgcggttcattagttatcttccgctgctcttgccgctggcgttgatgttggggttgctgttgtcgctgggccggttgtatcgggattcggagatggcggtcatcacttcaattggtgttggccctgggcggatgttgccgtcaattctggggttggtgttgcctgtggtcgtgctgatcggtgtgtgttcgttgtggttggcgccttgggccaatcgcaccgccaatgatttgctggagcaggccaatcgcagcattatcatggcgggtcttgaagcggggacgtttactccgatgcctgatgggggggtggtttatttatcctcgctttcctctgatggtacgaagctcaatgcggtgttcatgcaaagtcagaaggacggccggatagcggttgtcactgctaagcgtggtgagatgtatgtgcagggggataaggggcgttatttgcgtctggaggatgggcagcgcgtggatgggcctgccgatggtgctgcgctgaattaccgtgtgctgacttttgcgcgcaatgatgcgttgttgcctgcgctgtccgtggtgtatgacagcaatcatcccgacattctgcccacgttcaatttgatcggtgatccgcgtcgcgaggcgcaggcgcagttgcatgcacggcttgcgcctccattgttggcattggcatttgcgttgttggtattgccgctgtcacgcagcgctccgcgtcagcaacgctatggggctgtcatgatgtgtttcttggtctacatggtgggcaccaatctgatgattgtcggtactcagtggatcgccaacggcaagatttctgctgtgtggggcttgtggtggctgacgttgccgttgctgttggtggcagtatggttgtatgcccgcggtggccgccggatgccgtggccgcggagaagccgatgaaactatttccatgtttgcatgatcgttacgttgcgcgtgctgtcgttgctacggtgttgttgacatggttggtgttgttgggtctggatgtggtgaatgcttttgccagtgaggtacgcgacatcggcaagggcagttacagttttggtcatgcaattgcttatatcgcttacacggtgccgcgccgtgcttatacgttatttccaactgcagcagtgattgggatgttgctagggctgggccagttggcggctacctctgagttaacggcgctgcgtgcgctgggggtctcgcgcaagcggttgagtctgtcggtgatgatgatgattgggatgggcaccgggttgatggcgctgactggggagacgctgggtccttgggcgcaagcccaagcagacatattgaaggccagtgctaagtaccagagcgatatgaccggggcgcgttattccggtttttgggcgcgtgagggtgaggtgtttctcaatgcgcgcagtggtgaggagaaacgcttggatagcggcggcatcatgttgatattgcatgatgtgcgtttgtatcagttggctgccgatgggcggttgcaaagtatgacgcgtgctgctcgggtggaacatcatcaggatgtttggatacttcagcaggtgcaacgggatacgttcagtgaacgtggggtgcagcgtgagaccttccacagtttgccttggcgatcacggcttgatccggcagcgcttgcggcgggtttggcgaagccacgtaatctgtctgcgcacgagcttgtgcaaagcattgagtaccggcgccgtaatcacttggatgcgcgcgatttcgagggtcagtactggagtcgctggttttacccggtcaatgtgttggcgctgtgtttggcagcgattccgttttctttcggtctgctacgtagtggcggtatgggtaagcggacgttcttaggtattttgtttgcgctgagtttttggatgttgcagatgttttttgagcgcattgccagtgtgctcaagctcaattaccaaattttttatttattgcctccaatggtgatgttgggcgggtcgtattggttgtttcggcggcagcatcgttgagcggttgtgtgggtgagtggcgtggtaatcgttctaggcgggttcgacttgcgcggtcgtgccaggtgcggccatcagggtccaaccatgcccaccagaatccgcatccaagggtagcgagcgacacgctggcgacagcgtagcggcgccacaacatgcaccagcccggcggggtgtgcccagtggtggcgaccacatgcagttgccacggacgcatccccaaggtctggccaccgtagcgccaactgacggtggcatacaggccggttgtgcaccagcaacacagccacagcagccattgccagggactgaatggggcaatgttttcacgcaggcgatggctggatagggtgtaagcaagggtgaataggagtgcgaccagtagccagagtgccagtatggggagtaagtcgtagctgagtgccagcaggcggcggccgatgagtggtgaagtgcggtgtgagatggacatggtgggtttgcagcatggttgaagaacggcagtttgaggaggtgtgtggagggcagaatgccaggtggggatggatgcgatgctgaagcgtatcgcggtcagtcgtgagagggctgtaggtttatttgcagtgcatggtgggtgatgggttgcgttgtgttgtgtaaagggccagcgcaggtcggttgcagtggcggttggtccggtgatgtttgcgggatatttatttttatctttttgattggatgtgttcaccccccccggggaggggggcggtgccggcggcatctgtgttggtttggctgaggttttatggggagtctcaataccaggtgttatcgcgttgcatgggtgtgcgaggtgatgttgtggtgagcaggttgcgcgcttttttgtaggttgctgtcagaaggtgcggaggttaaggggcgacatcgttacaatgtctgctttgcattctgtggctgtcttatgtgcggtattgtcggtgccattgctggccgtgatgtggttcctgtgttgattgagggcctcaagcggttggaatatcgagggtatgattcttccggtatcgcggtgcttgagagcgggtcaatccggcgggtgcgtcgtactgggcgggttgctgagatggctgtcgccgcaacgcaagagggatttacagcatcgcttggtatcggtcatacgcgttgggcaacgcatgggggagtgaccgaggccaatgcgcatccacatgtgagccacggtgttgtgttggtgcacaacgggattattgagaatcacgaggttcagcgtgagcgtctgtctgccttaggttatgtcttccagtcgcagacggatacggaggtcattgcgcatctgattcattaccacatgcagcaaggcgatgatcttctgggggcgttgcagtgtgcggtgaaggcgctgacggggatctatgcgttggcggtgatgagtgaggctgaaccagagcgttttgtctgcgcgcggatggggtgcccgttactgattggtataggggatggtgagcatttggttgcttctgacatctctgcagtcatccaagcaacacgtcaggtgatttttttggaggatggcgatactgcggagattcgccgtgatggaatcagtattttcaatgcggaacagtgtccagtggaacgtccattgcatctgtcgaatgtgtcgctgtcttcgttggaattgggggagttccgtcatttcatgcagaaggagattcatgagcaacctcgggtgcttgccgatacgatggaggcggcgattgatgcggctggatttccacccatgctgtttggtgcgcaggccgagtcggtgttccgtggcattacgggtatccagattttggcgtgtggcaccagttactacgctggtttgaccgcgcgttattggattgaggcgattgctggtttgccatgtcacgtggagattgccagtgagtaccgttaccgtaaggcgtatgtcaatccacagcatttggtggtcacgatttcccagtctggggagacgctggacacattggaggcgttgaagtacgccaaagcattaggtcaccgtcatacgctgtcgatttgtaatgctcctgacagtgcgattccgcggatcagtgagttgatttgctatacccgtgcaggcccagagattggtgtggcttcgacgaaggcattcaccactcagctggtggtgctgttccagttggctgtggcattgggggtgctgcgtggggctgttgatgctgagcatgaagcggcgtatttggagcaattgcgtcaattgccttgcggcgtacagcaggcactcaatctggaaccgcagatcgctgcgtgggcggagtgctttgcgtcgcgtcatcatgcgttgtttcttggtcgcggtttgcattatccgattgcgttagaaggtgcgctcaaactgaaggaaatctcttatatccatgctgaggcgtatccggcgggtgagttgaagcatgggccgctcgcgttagtggatgctgatatgccggttgtggtgattgcacccaacgatagtctgttggaaaaggtgaagtccaatatgcaggaggtgcgtgcgcgtggtggggagttgtttgtgtttgctgatcaggacagtcactttagtgaatcggaaggtttgcacgtgattcgtacgctgcgccacacgggggtattgtcgccgttagtacacacgattcctgtgcagttgttggcttatcacactgcgctggtgcgtggtactgatgtggataagccacgtaatttggcgaagagtgtgacggtggaataatcctggtgcgttttttattgaatgtttaaaagtgccgagatttcagcggttttatgaccgtaacgcgtcatggtgcacgatgcacggtatgtcagatgtttatattgatctggatcaaatgaatatcttgatgatgtcagaaaggggaatcagcgttacgcttgtacgttagtcagcgctgataacagaggtatcgccggctaagcatctgatcatctaacgatgacgtgttttgttagtaacagccatgatttggagttttaaatgttattttcaaaaggattggtttatgaaaaataggagtgttgatgggcttcgagggatagcggcttttaatgtagctgtttcgcattttgtggctgcttttttgccatcaatgcttcataaaaattacccgtcacttggaaaaaatcagcatcctagtgggttgttcgatgttcttacatccccaatggtaagcattttttataacggacattttgctgttttgatcttctttgtgttgtctggttatgtgttgacgatgccatattacactcaaggtgaatcaaacggagttttaagtaaaagactgtgggggcgttatcttaggctgaacataccgatctgttttgccatttcaatatcgtatgttgtttatgtgtcgggtctttatttgaacgtggctgcggcggatatgtctgggtccattgaatggttaaagaatttttttcctagtgggatttcgttatcggatgctgttaaggagtctgtattccaatctattatttttgggaatagtgctcttattcctcctctttggacgttgaaaatcgagtttattggctctttgtatgtgttgcttttttatatttcaaagccaaaatgttacacttttgtatcagtattgatggttcttttgttgatatacgcgatacacaaacaggattcaatatacttctatgctatttttcttggctcttttttgaatcagttaaaaaaatcatcaagattgaaggttgtattcttttttatcggtttttattttggggggttccagttcgaaaattcgatctacaattttcttcctcgagttatggttggtgatttggaggtgtgggataaaaagacgttttacaacttgatcggggcctgttttattacggcatcagttgttcaagggtttggtgaaaaaatacttcaatggcgcattcctcaatttttgggtggcatttctttttctctttatttgcttcattttgtagtactttgttctttctcatcgtatgtgtacgtcagtcttcctatggggaggacatctgtgctgcttaactttgcttcttatgtgttggtgtgtgttctggtgtcttttatttttgagaaatacatagacaagccgtcgattaatatttcgcatcagttttctaagaagatatttagtaagcaggtataatgtttattcttaatcttattttttgacggcctgttgagagtgtgtggaagcaatggtgttttctttgctttctgagtgttctgtgattggagcggggtaaggttttatacaaagttgggatgtgtgatctctcgaatgtgatggaccagttgctattttgtgtctttgtcagcaggtgagtcgtgatgagaggaggaggtgctgctgcagtgccggtgttagtgtcggcacgctattgtgcgtagggggcatggggttgcccgctgatggctcgcagcagcaggcattcaaatgcggttggttttggcgttactcgcctaatgcgtgtgcgatgaaggggggcgggacgagtacaccatgatgcaggtgtgcgttgtagtacagggtgtcgaagggtttggtttgggcgtcggtttggcgaaatgcaaagttcgcgttgggttgtttgctggatagggtgacgctccaccagccggtgggatagcaaggttgtggaaacggtagggtcttgaatgctttgaagccggctttgctcatttcatggcgcatttctttgatgagttctagtagtgccaatggtgattcggattgctgtacgagtaatccatcattttttagggcgcggaaacagctttcgtagaaggttctgttgaataagcctttggctgggccgacggggtcggttgagtcgacgataatcacatccacgctgttggttgggcaatcggtcatataagccacgccgtcgctgaacagcagtgtggcgcgtgggtcgttgttggaggtgcatagttcagggaaatgtttttccgccatgcgggtgacttgttcatcaatatcgcattgggtgacttgttctatgtctgggtgtttgaggacttcgcgcagtgtgccgcagtcgccgccgccgataatcaccacgcactttggggcggtgtgggtgaatagtgctggatggctgatcatttcgtgatagaggaagttgtctctactggtgagcatcaatgcgccgtcgatcaccatgagcttgccccagtccgtgctgttgtagatttcgattttctggaatggtgattgcacttcatccagcttgccagtgatgcggaagccgatcgctgagccggttgcttggaaatgttcggtgaaccagctgtcgttggtggtcatgtggggaatcttcgggtggtaggtggggttggtaggtggtctgttccggtgtggagcaaggtgctgtgggaaggtatcaacgtggccgtgatctgtttgggatgggatggagtcacgggaggatgtgatgtgctgttttgcggtggatgtggctgtgtgatgtgcattctaacggtcgctggtatccaaggcttgtagaatgcggctcctttggctttattgaagatttttatccatgacctggtctcaagatctcgcccataagacgtattcgatcctgcattgggctgatgggtatttcgaggtgaacgatgctgggcagatggtggtgatgccggtcggtcgcgatggtgtacggatctcgctcccggaggttgtggatgctgcgcgtgccgccggtgccaagttaccgctgctgctgcgtttcccggatattctggggcatcgtctgggtaaattgcaggcggcgttcgctcaggcacagtccgagtgggagtatgcgggtggttacactgcggtttacccgatcaaggtcaatcagcatcgcggtgtggcgggtgttctggcgagtcaccagggggatggtttcggtttggaagccggtagcaaaccagaattgatggcggtgttggcgttatcgcgtccgggtgggttgattgtttgtaatgggtataaggatcgggagtacatccgtcttgcgttgatcggacgcaagcttggtttgaagactttcattgtgatcgagaagccgtctgaattgagaatggtgcttgaggaggcgaaaacgctcggtgtattgcctggtttgggcgtccgggtgcgtttggcgtcgttgggtgccggaaaatggcagaacagcggtggcgataaggcaaagttcggtttgtcgccgcgccaagtgttggatgtatggaaggtgctgcgtggtactgagtatgccgattgtttaaatgtgatgcactttcatatggggtcgcagatctccaatgtgcgcgatatcgctaaggggatgcgtgaggcgacccgttactttgtcgagctttcgcgtttgggtgcgaagatcacgcatgtggatgttggtggcggtcttggcattgattacgagggcacgcgttcgcgtagtgactgttcgatcaattatggtttgcaggcgtatgccagtcatatcgtgcagccgctggcaagtgcgtgtgaggattatgatttggtgccaccacgcattgtcacggagtgtggtcgtgcaatgacggcgcatcatgcggtgctgatcgctaatgtgaccgaggtcgaagcggtgccggaggggcgggtgccaggggtgtgtgatgatgagccggcggtggttcgccacatgcgcgagatttacggggagttggatgcgcgtccggcaatagagttgttttatgaagcacagcactttcatgctgaggggttggcggcttacaccctcgggcagattgatttggtgcatcgcgcacgtattgatgatttgttttatgcgatttcgcatggggtgcgggagcgtctcagtcacgaggagaagagtcaccgtccggtgttggatgagctgaatgagcgcttggttgataaatattttgtcaatttcagtgtgtttgagtcgattccggatgtgtgggctatcaatcaaatttttccgattgtccccattgagcgtttgaatgaggcaccgacccgacgtggtgtggtctgtgatttgacctgcgattcagatggtacggtcaagcagtatgtggaaaacgagagtttggacagtgcgttgcctctgcatgtgttgcgtcatggcgaggcttacaggattggctttttccttgtgggtgcttatcaggaaatccttggcgatatccataatttgtttggcgataccgatgcggttgaggttgcagtcgacggcagggggtatcgtattgcgcagcagcgttgtggtgatacgaccgatgtgatgttggactacgtcggttatgcgcttgatgaggtgcgcagggtatatgcgcaacgtattacggcagcggggatgtctgctgctgagtccaaggcattgagcgatatgttggaagccggtctgacgggttatccctatttgtcagatgtgccgctggagtgagtgggaagtgtgtggggcggggtcatctattgcggttgccgtgcgacttggaagccagcaaacgactggttaacggacatgatttccagccgattgatgttgagatgcggcggtagtgtggcgatgtagaagatttgctcggcaatatcttcggctgtgatcgggttggcgccacgatacagtgcgtcggaagcggtttggttgccgccagtacgcactagggtgaactcggtttcggccatccctggttcgatgctggtcacgcgtacgccggtgccatggagatctgagcgcaggcccagtgagaattgtttcacaaatgccttggtgccagcgtaaacattaccgcctgtgtagggataggtcgcggcgacggagctgatgttgataatcattcctttgcgttcgatcagtgtcggtagcaggtgatgggtcagggtcactaatgaggtgatgttggtgtcgatcatctcccgccactgtgctagatcagtgtgttgtgctggtgcggtgcccagtgccaggccagcgttgttgaccaggacgtcgatgtcggcaaagtctgctggtagcgtttgaatcgcggtgtgtagtgtggcgctatcccgcatatcgaaggcggtgatgtggatgtgtccaggaggccattcggcggcgagtgcttccaggcgctcaatgcggcgtcctgtggcgatgacacgccagccggcgttggcgaagcgatgcacggcggctctgccgaagccggaggtggctcccgtgatcaatatggttttagtcatcgcgtctctgtatgcggtggatagtggtagatggttgtatcgacgacgctgtgcatggttggggggagtgaaaacaaaaacgatggctgcaggtggccacggtgtggggagttttggtgcagatggtcctgtgattaatgggctttgatggtgatggcttgcaagccgttactatcgattttttttctggcttctgccagttcgttggcgttgctatatggtcccatacgcacccggtaaagttgtttgcctccgatgttggttgattcgatgcgcgcactcaagccgagcatggcaagccgggctttggtcgattccgcttcattggaggtgccgaatgagccagcctgcaaaatgtagcgggtggtgtccgcgatcgctgccggaggtgggcttgtaggggctggggttggtttttttggggtgacaggtatcggtgcttggctaggggagagcggttccggtaaaggtttgggatcgttggtggtggtttgtgctggtgtactggttatcttgggcggtgtgttgctgggcacggtgtttgctttctctattcggtcaccgttggatgtcggtacttccttgccgggtagcagggtgtagaagtcgtattcctgttgttctggggttggtttgtccttggtggttggtttggatggctgcgcaataggggtattgtggtcgatcacgggcgccggttgcgcgcttgggttggaatccgcaccgatgtgcaaaaggctgccgtcgtttttcttgaataatcttggcgctgctagaaatacgattgcagtgatcgccgcaccggcaatcagccatacccaccctggaggggcattattagtgttgcgccgtgcttggtttctagcgcgcggtgttgccatcaacttctccaattacttcttcatagcggtgtgtttgattcacatcttttccggggtgccgacgccgagtaggttcaggccgttggcgaggacttgcctggttgcgcaggccagtgtcagctttgcgttgcgttctactgcgttctctaccagtacgggtgtgttgtgataccaggtatggaatgcatgcgctaattcacgcaggtactgtgcgatcaggtgaggttccagcagttcgcaggcgatttgcacgatttcaggatagcgcgatatttctatcatcagacacagtgaggtgttgtctgaaagttgatcaagggacgccatgccgctggtttgatcgtaatttaagttcttttcatgggcttggtgcatcaggctacaaacgcgggcgtatgcgtactgtacgtagaatacagggttgtcgttgctcttttgacgggccaagtcgatgtcgaaggtgagttgtgaatcgggtttgcgtgcgatcagaaaccagcgtgttgcatcggtgctggtctcctcaatcaggtcacgtagcgtgacgtagcctccagaacgtttggagagcttcacttcttcgccaccacgcatgacagtgaccatttggtgcagcacatattctggccagccgggcgggatgcctatttctaatgcttgtagtccagcgtggacgcgtgccagtgaaccgtgatggtcggctcctagttcggtgattgcgcgttcgtagccacgttgccatttgcttaaatggtatgcgatgtctggtacgaagtaggtgtagctaccgtcggatttgcgcatgacccgatctttgtcgtcaccgaaatgggttgacttcagccacagtgcgccgccctcctcataggtgtgaccggagttgatcagtttctggactgtttcttcgactttgccatctttgtaaagcgagctttccagaaagtagatatcgaaatcgacgttaaatgcggccaggtcgtggttttgttcgttacgtaggtagttgacggcgaagtggtggattgctgctgtgtcgtcgacgttcttggtgctggtgatgatggtatctaccatgttgatgctgtcgccagccaaataggctttggcaatgtcggcgatgtactcgccgttgtaggcatctgttggccaaaaggcgtctccaggtttcagtccgcgtgcgcgtgcctgcactgagcggacaagattctcgatttgtacgccggcgtcgttgtaatagaactcgcgtttgacgttccagccattggcttccagtaaacgtgcaaggcagtcaccgatggctgcggcgcgtccgtgaccgacatgcagtggacctgtcggattggctgagacgtattccactccgacggtgcgactttgaccggacaggttccggccgtagtcgttatcctgtttgagcacgttgattgtttcgcgctggtacgcgactggatgcaggtggaagttgatgaagcctgggccggcgatttctatccgtgcaatgtcggcgctggttggcagtgctgcaaccagagtctgtgccagtaggcggggattgctgccagtcgctttgctgagcagcattgctacgttggtcgcaaagtcgccatgtttgcgcgtctttggacgttccactacgaaatctggaggcagagtattagtgggcaaggtgccattgctacgcaatgcttcgatgccttggcaaatcagggcgcggagtggggctttcacgtgtgggtgtgggtgtgtggcgatagatagcgtaattttatctgaccgtttgtatgagaagcgcgttagcattcagtttgtaggctgcttggcatcccacccatacgctgaataggtgtcttccaggtttatagccagccatgttcggcgaatgagaccggcgcaccgtcgccaatcacgaagtggtcgactaggcgcacgtcgatgaggtctaaggcgttttttaagcgttgggtgatcattcggtcggctggtgatggttcgcggttaccggatgggtgattatggccgacgatcactgctgctgcgttcagagttaatgcgcgtcgtacgacttcgcgtggatgtacttcggcaccgttgatggtgccgtggaacaattcttcaaagctgatcgcgcggtgcctattgtctaaaaataggacggcgaagacttcatttggattcgctcgtaggcgctgtgcgaaatagcgtccggcgctgattggatcgtggatacttgcgccgcgttgcagggcggcggctaggtggcgggtgcttaattccagtgctgcggtgagtttgcaggcgcgtgccagacctaacccgggcaggcgcatgagatcacctggaggtcggtccagcagttctcgtagtgggccatgagtgtgcagcaggttacgtgcagtttgcacggcgtcatgaccgcgcaggccagagcctaggaagattgcgagcagttctgcatccgaaagtgtggcggcaccgtgggccagcagtttttcacgtggtcgttcatgcgtaggccagttgttgatgtgcatctgggtaggataccgagatctcatgtttctcggatatcagactggaatggatcatcggctaatctagtcatcctaattaaccgtaggaatcaactgaggtgactggatctcatcagccacggtcattgaacggacagcgtttgctgttgtgtgtcagtggtggtattgctgcttataaatcgcttgagcttgtgcgccgcctttgtggtgcgggtgttcaggtccaggttgcgatgactgctagtgcgcagcagtttgtcacgccgcttagtttccaggcattgtctggccaatcgacccgtaccacgctgtgggatggtaacgctgaacaggcgatggggcatattgagttggcgcgttgggccgagtgtgttttgattgctcctgctagcgctgatgtgatcgcgcggttggcgcatggtttggcggatgatttggtgacgactctgtgtttggcgacaacggcgctgctgatcatatgcccagcgatgaaccacaatatgtggctgcatccagcgactcaggcgaatgttgcgatgttggtggggcgtggtgtgcaggtcatcggaccagaggatggtccgttggcagaaggtgtgtctgggttgggccgtatgagcgaaccagaggcgattgttgctgcgttggttcagggggtgtctccagctccagttcacggtggtttgttccatgggcagcgcattgtgattagtgctggacccacattcgaagatttggatccggtgcgttaccttggcaatcgcagcagtggcaagatgggttttgctttggctagtgcggcggtgtcccatggggctgaggtggtgttggtggctggtccggtgtatcagccaactccacctggggtgactcgggtggatgtacgttcggcggcacagatgcgtgatgcagtcctcagcgcgttccccgcggatgtttacatcggtgcagctgcggtggccgattacgcacctaaatctgtgttgccacaaaagatcaagaagtccggccagacgctgaccctggagttggtgcgtacccaagacatcttgtcagaggtggcagcgcagacggctaacctgaaatttgtggttggtttcgctgcagagacgcatgatgttgagcgctacgcacgcggtaaattggctgccaagcacttggatttgattatcgccaaccaggttggcattgttggaaacggttttgaaagtgatgacaatgctgtcactgtgtattggcagggtggcgagcgcgttttcgccagttgcagcaaggtggagttggctgagcgcctgctggcactgattgctgaaaggatgcagacatgagtgctgctgtacaaccactgcagatcaagattctggatccccgtcttggtaccgtttggctgctgccgacctatgcgacggaagccagtgctgggcttgatttacgggctgcactagatgcaccaatgactctggttcctggggatgcggagttactttctacgggtgtagcgattcatttagttgacccgagcttgtgtgcagtggtattgcctcgttccggtttgggacatcgtcatgggattgtgctcggcaatggcacgggtttgattgattcagactatcaggggccgttgttggtgagtgtttggaaccgtgggcgcgaggctttcactatcgagcctggcgaccgtatcgcccagttggttgtgttaccaattgtgcgggtagtgcttcaggtagtggatacttttgttgaaagtgggcgtggagcgggtgggtttggtcacactggcgtgcgttgacggaggaagacagatgagcgtgacaattggaaacgagttgattttgccgatgaaacgccgccggattgcatttctgttggcgatgttgtgtctgttgctggcaggggtgttttgttggggggcgtacatacagtggcgccagaatgtggtgcagcagaagctcgagcaggcacgtgatggtgctgttacgtcattgcttcaggtgctgtctggtcaggctaagcagttgcaaaatgtggtgcagcgtccagccatcgtacaggtgctgggtggaggtgacgtcacggcagcggctgcagcggttcgtgagcaatttccaggcactgaggaggtacaggttctgaccggcgatctgagtgctgcttatgcggatgtggcgcgctccggttatgcccgccttgggctgatagaggcggctcttggtggtgatggtgtgaaggcatgggttgtacgtgacggtactcagattggcttgggtatggctgtgatggtcaagcttggccaagctccggcggtggtctatcttcgcctgccgctacgtggcttgataagtgcgttggatgcgattgaggtgcctaatagcacttacttggcattgcgccaggggagttatacggtggtcgagcgcggtagcgcagcgttagccagtggtggtgaggtattggctaaaccgctgggttgggttgatttgcgtgtggctgccgctgtgccgcagctggaaaacatcccttttgatttgggattgctgccatctttgattgcggcaggggtgtttgtgctagttgcggcagtcttgttgttagttgcgggtgggcataggatgctacccaggcgtcacgcgcaaatggccgatgcagaacaagaacagtttactttgcgtgaaagtgtggtgcaggagtcgccggagcgcgcgatcgttttaaatgaggaaaacaacgttgcattgtcgtcgtcgctgcatcttcagtccaatttggaagcggtggttcaacccagtcttttccatgaagacgatatccacggtgtggttcctggcgagttgaacccaggtgtggcgaagttgatcggtcaagcgatcggcagtgcgatccaggtcaaaggtttgagtgacattgtgattggccgtgacgaccgcgtgtccagttttgaattgtctgcggcattaagtgatggtctacgtcatgccggttgcaatgtggtagacatcggcttggtgccgatcccggtagtgtatttcgctgcctgccatcttggcgttgggagttgcgttgcggtcacaggggggcatcatcctcatgattacaacggtttcaagatcgtgcttggtggtgagtccttatccagtgaggcgatgagcgatttgtatcaatgcatcaccaatggtcgcttatatgcgtccgttgactccggcaatttgagtgagcgtgatgtggttgacgattacattcagcgtattgctgatgatgtgcagttgaatcgtccgctgaagattgttgctgatcctggtcacggtgcggctgaagagatcctgtcacgtttattcaaggcgattggtgcggatctggtgtcactgtacggtgatattgatggtgtttcccttcatggtcatcctgattcggacgagctagggaatctgcagaagctgattcagcgggttgagcaggccgatgccgatttgggtcttgcttttgatggggatgcggcaagtctcagagtggtgactcgagaaggtgaggttattttatcggatagcgtgttgatgttgtttgcgacggatgtgctacagcggaatccgggtgctttggtgatctatgatgctgaatgtactagcaagttgtctgattgtgtattgcgcaacggcggcagcccgttgatgtggaagaccgggcatgcctccatcaaagctaagatgcgcgagaccggtgccgagttggctggtgaaatgagtggctatttcttcttcaaagaacgctggtatggttttgaggatgctctgtatgcggcggcgcgtttgctggagatcttagcgcagcgcgaagataatccgtcccaggtgtttgctgcactgccccatgcttatttcactgcccaaatggagcagtctgtcgagggtgatgcgcaggcatgtgtacagtcctttattgaggaagtgcagcgtagcgttgagggcagtgtgttcgatggtgctcgtttgttcgcctttgatggtttgcgtgctgatttcactgatggttgggggctagtacgcgtttctgacactgcatctgcactggtgttgcgttttgaggctgacacgcaggctggattggagcggattcagagtgcattccgcacgcatttacaggcattactacccggtcagatactggtgttctaaatctttttaataattagggttccgtgagtggtgaggcatttgcctcactgcttttcaatgctcggtaacgttgtagggtttcttcgatttccccgttaagtgttgcgcgttcttgttcgaaactggtttgcagtcgttgctgcgactgtaggtcttggcggcgttgctcgatatcagcggcgagtttctctggtactttctgtctcgcgagttcccgttcattggcattgcgtaacaagttgactaagccttggcgcaggttggttgcgttgtaacgggcggttttcaggttgttgtcgatggtcgcgatgcgttttaagaatacttgtcgcaaatcatcttcggtttgaaacgaagccaacatgatttggtcagcccttttacgggtttcttgggcgtcttggtctgcgcgccgttgtgcttcttctgacgcagtggcggcacgttcattctcattgagcgcgcgttgcacttcgcctttgagcatcccattttttgcattgaactcttcgcgtgcggcattcactgcttcggcaggcagagcgtcgctgcagacacgttgtccattttggtgccagcagtacaatttttttgctttagagttagatgtttgggtgttgccaggccacggccatgcggcaacggcagcaaataagatggtgttccagtagatgtggtgtttttttatggacattgcaggtcacttttttgcttgttcagtcagatgcttcggtcccatagtgggtcttgtaggccagcagaggctcgtaaaacttggctaaactggcgttctcttcgacaaatgctaacaggtcgctcagggttgcgatcgctacgacagggatcccggtttcggccatcagtgcttgaacggacgattggcggttggtctctgaagcgatttcctggcgattcagggctacggcaatccccgttggggtacctccagcgttgcggatgatacgtaatacttcgcggattgctgtgcctgcggtgatgacatcgtcgataatcaatatcttccgtccgttcagtggtgcaccgatgagggtgccaccctcgccgtgatttttgacttctttgcggttgaatgcgagcaggaggtcgcgctcacgccgtgcgtattcgcatgccagcgctgtagcgagcggaatgcctttgtaggcagggccaaacaccaggtcaaagttcatattcgccgcatcaattgcgtcggcgtaacactgtgctaaggcagcagtttttgcacctgaattaaagtgtccagcgttgaagaaatagggactgatgcggccggatttgagggtgaattcgccgaagcacagcgcgtttgagtctaaagccagctgtaggaaacgttggcggtagtgagacatagaggggtcactaagtcatgtggagaggataaagactataagcatagccactggcgcggtcttctctatcgtgccaagagggacttttcggatggtgttcttattgtgattgttttacgagtactgtcagttttaattgagagagagactttcattagaattcgaatatatagcaatgattttaatgtattaagttgaatttcagcgcagcgtgatgacgttcgggggactttgaagtcctgtgcgtatctctagttggtacaaaacggagtgatataacaatgctcatctatcgagatggaatgttgtttatccattttgagatcagagatgccaagcgttctaaaaggttgtatcggtttactgatgtcagtggtttttttgtgggcatctggctcaatgatgtgtgcttttgaggcgctattggtgagcaagcaatggatgactttctgattccgccagtggaatctcctctttgatctatgacgtgagtgttgctgctgaggatatgcgttaagtgtggttggtcgtactatcctatgtcggtttccacctccatcatgacaatggtcctgttttttgtggaaaggaagcatcttcccaggaatattcgtagcccgtggatgtttgaaatagtggaaaaattctagtaagcaggagccagaatacaggggcgtgatgtgttgcctgcgtgtatctcgataggtgtgatccagcataaattttaacgagaattcgacaatttgattctcaaattattaattgatactagaaattacaggctatcttcataggataagagataagattattagagttttattggaattttatatgaccactgcttctctagatttcccttttgttgcgttccgtagtgaactgccaatgaatgattattctgccccagatatgaaatgtggtgatttaacgaaggagcaattaatacacgattttgggctgtcttttgtttcttttcatgtgaacccttttaataacgaggaggggtttataaaaggaaagagtaaaattatttctgacgaagaggtggtgattatattatttaatgagttccgtttttgggccagagtattatcatttggtcgttattcaagtttgatgcagagtcttatatctaatttccaagataataaaggaacgccttttagtgatcctttacttgataaggcattcaaagagctaatcctaaatgaaagatcagagaatggttctatatcaagaataaaatcagtctttgataattgtattgattgggagagaggggttttcccatcggaaaacaaggagtatctcattgaaactctcaaaagcgcgatatatccagaatttactcgggttcaagatacatttaacggacttgggctcgcggttcataatattaattcaatgaatattgaaattaattcatgtaatatctatgatgatcattactgtgctagtgttcattatcaagggcaagatcattttggattggatgatggtgatattattgatataagattccactattttagtatattcagaatctggtttgttctgcaacgttggaatagatatgcttttaggccttttatgactaatatgcgggcgaatatcgaaatttcaggggtaaggcccgctaataaatgaaatttcttatcacgaatttctaaatcatgaggttggtgtagcgagcgagtttgtttctgggaaggggctggaatgctggttgtctaatgaaatcattagattaaacgatggctgctgagtcattttctactgttttagtcggttttctagtgaggttctgtcttaagctgggcaaggggacagcgcaacccaataccttaaaattggattgtgttatccccttgggagttttaatacatcctgttaatgcgagttgaatttcttattttctgacggtcttaatcacccaaaagtcatcagccaattgtgtattgctgatgtattcataaggcatccagaagtagccgtcttctccgacgttgtttccccatgaattacggatacgaaagtgtcttatttcatcatcatatccgacacacaagacggcatgtccaccttcaagcgtatcgtttttggttggtaatgggattctaactgggagcgagttattgcctacccaactgttatacactgaaaaaccgaatacaaatggtgaacctacagcgaggcaagctttaaggtgatcaatatcttgagccaccctactatattcggtgattttgtagttttgagcatccttgtaacattgatctgacggttttttacttgctggagctccaggtggaaattcctcggttctcggatctgcaggtgtatcgccgtagggccattccttttccgggcataccccaagtttatggaggactttgataccatcgcggatcatcgccccagaatcataattaacgtggccttcaatttttctttcattataataaatgaatagtcgtgatggaatgaattcaggtgactgcttgtcatggatgcgttcaaattgaattgcggcagcaagagcattggcagtacatgaaccgatccgcccttgatcgtaaacttgaaaaggtggggttaaatcaactttaggtggtaatgcagctatgacagatttctctggggtgtatgaaaagtcacgaatatcagctatatctgggatatagccatatcctgatttttttcttcttttcaagacagtttgcatcgcaatttaccctgataaatttaagatcggtttattttaaactgccacttggttagcactttgcatatatatttgtataagcaatcccaaagataacattaaaaccctttggatttcgtgatatgactcttgaaaatgtaatgacaatatttatgctgatttgaacttgataagcatctttatgaagacgcgatccgtttggatcatgcttggctgagcttgatgtaggtattgcagttaaattactgctatggattaacgtgcactcagattggtggtgtttgagcagttggtgatgatctcaccccccccccatacatctgtggccagccaatgtcgtgatagaaggcctgctgtggcgggagtacatcgcacgctatagattattttggtgcgctgtgtcacttcggccctcagtgtgcagatggggagcgatggtgtgcggagggtccctggagtgaatgcgagggtttcgcggaaattttgggccattgaagtgtccaaagaagatgtttacagagcaaggccgttgttttgctgacggatcatctggatattttccgtctgttgatgaggttggatatcgcagtgtgccaacgcagtgacattattgctggtgattgttgcgccagtggatgatgcaggtgttgttgcgatgtgtaggtctcgttgttgtggttttctgtgtcctgtcgactacaggtgatggtgtttgctacgggaatggtgtgtgccattgaatcaaggatgggtgagaggtgatatgtcggcgtaagtatcttgggtcattcatgaggaaacgaggtggggtgttgatgggtgcctatgacggatgggtaggagcagctgaggtgttgtgaagcgaatctcgtatctccaggaagtgtgttggtggatgttgcaaaaggtcgtgaaattgtcgatgcgtgcggcacgtgtgttgctatttacgttgtaggtgttgattgttcaatgtgatcttagccgagagaagcggctgcaataatttaatattatccaggttaatgagtttcaggtggcattgctgcaagttgtaaaatatctttccgagtgcgagtcttcggggcgttgcgtcagtgtattgaggtggtgatcttacttgtgcaccttaggtatccagatgatcgtgtgcattactacattaaacagggatggcaagaattaatcttaattatgcgaatttggggccagatcagtttgagcgtttgattgtgtctttatgtatgaagattctgggtgttggggtgcagggatttgcaaagggtccggacggtgggtgcgatgcaaaattcattggtaccgcgcagcactatccaagcgataaaaaccagtggtcagggacaatgattattcaggccaagcacaccaatcgcttttactctagctgttctgataaaaatttctatagcgagaaaagtagtcatacggtcattggtgaagaaattccacgtatcaaaaaattacgcgctgccaagcagcttgattactatatgttgtttaccaatcggaggctatcagcgacggcacacacaaaaatcactgaatatatttcctagcaatgtgaaattccggttgagtcgatttccctctgtggactagagaaactggacatgtatttcaatcattttccagaagctgtgcatcatgctgggttggatcctgtagattcaccgctgattgtcagaacgcaggagcttgcggagattattgaggcgttggcacagttgaaggaaaaggggtgtcatgtgctgcgtgatgattcagccgtgatacgggtgccctataaagagaaaaatgaacttaatcagttgagccaggagtatgagaaagaatggcggcgcatctacctgaaagaagaattatttattcgtaattttcttgcggcaccggaaaatacaagattcgtagagatgtacacatcgaccactgaagattttcaatttaagattattgcgaaacgcaaggaccaccagagctttgatgcgttggtcgaatccttgatggatatgttgtttaatcgtgatagcgtgctggcgcagagtggttatcgatcgctgacacgtgcgctgcttttttatatgtattggaattgtgatattggaaagaaggtagatagcacggaagaggctgaagatgctgcgtccaacgaaacactcacatcttgatctgacggtcattaatctgtcactgctcttgctgaagaggctgagaaaggacaggtcttctcggtatgatgtattgcgtgctttggccaaacaacgcattgcgggcggcgatgtgttgtttctaccggcactgaattttctttatctgttggggctgattgagtaccggggcgcgacagatacagtggaatatgtggggaataatgaagttatctaaactctattctaatcaccatcaggtatttagtccggtgaaatttaatccagggctaaatgtggtcatggcggaaattcgcttgccagagaataggaagaaagatactcataatcttgggaaaactacattgggacggttactcgatttttgctttttatcgaagagggaccgtaatttatttttgtttaaacatgaaaagctgttcgatcattttgtttttttccttgaagtggaatgtgaggatgcgtcatttataacggtacggcgcagtgtggggtgtgcaacaaagattgccttcaaaagacataagacaggtgataaggacttttctacgttgttgcgcagtgaatgggaccattgggatgtgacgtttgatgatgcgcgtcagttgcttcatgatctgcttggctggagaatgctcaaggactggtcctatcggaaggttcttggatatttattaaggtcgcaggagaatttttctaaggtcttcgagctgagtcattctgttgtaaaacatgctgattggaagccgtttcttgcgcatttattgggtttcgatggaaagtgtgctgctgagtattacaagaaaatacaggagcttgaaagtaagaaaaaagaagccgagttactgaggaagacctggggtcgctcgctcgatagtcttgaggagatcgaaaccacagaattacgtaagcaagatgaggtcaataagaagcaagcgttattggatacgtttgatttccacgcgcaggaccctgcgttgacggaggagctagtggatacagtggatgagcgtatcgctgcattgaatgcgaggcgttactccatgaggagtcactggaagagggtcaaaacctcgttgcaggaaggtcagatcctgttttgcccggatgaggcgcaggtgttgtttgatgaggtaggggtgctcttcgagggacagataaaaaaggattttgagcacttgattgcttttaatcgtgccatcactgcagagcgccatgattatttgcaagaggagttggcagagattgagggcgctctcaaggaggtcaatgcggagttggatgatttagggaaacggcgtgcggaggggcttgcgtttttaacgaatcggggtgttttcacaaagtaccagacactctgcaatgagattattgcattgcgtggagagatcgctttcttggaatatcaacgggaacctttgcgtaagttgcatgccttggatcagtacattggtactctgaagcatgaatgcattgatttggaggagaggattaataccgatgtacagcagcagtgttcggagaaaaagagtctctttgcttccatcggtcgctattttaaagagatgatccgtgaggttattgattgttatgggtcattgagagtgaccactaataaacacggccatctggagtttcatgcggagattacggatgctgctggtaaaccgaccagtgcggatcttggaaatacttaccgtaggttaatgtgtatcgcatttgatctggcagtgttgcgtgcgtatttaaacgatccattcccacggtttgtttatcatgatggggtatttgagtctttggatgatcgtaagaaggaaaatttgctaagggtgattcggcaatatgcgagtttcgggattcagtcagtgatgacgttgattgattcggatcttccggagcggagtgttaaggatcttccggtttttagtgctgatgaaattgtattgacgttgcatgatgagggtgagtctggtcgactcttcaagatgcagtcatggtagttatttttttgtagcagcgccgatcgttttatcgttgtgtcatcgttctatgtgatgcagtaaggcagggttctagtcgcgttttggttattttgtcttatttgttggtgtagttctgaagtgtcagatccgaagcaatgttaatgaggatggttgttttgagcagaatgtccgatgtgatattggtgatgtctaatgtggtaatcatgatgtgctgttggtcgctgggcaagaatatgagtcggtctgtatcggtttcagtaggtggattggggatacggtagtgatgatggaggatagtctttgcaacgttgtaacgatttgcaatcagtgatgggaaatgttgggttcttttctgggtcttatggttggtgatgattcatgcgacatattaaatgcagtctgagtatggtgtgacaccggcacgaatggaaaagaaaaaatagggtgttgtgctcatggatcagatgttggttatctttctatgagagggcaatcatcagcggttacgtttctttatgattctgtaatgggacgttctttttttgcagggtggtctttgtgtttgagaccagcattggcttatcgattgttatcttggtgggtgttgaaaatatagggcgtccatgtgtgttgggacgtgagtaatgtgcaaaatgtgtttgcagtacaagtcagtggtgtcgttagaatgcattcagtttgccggtaagtcatcagtgtgatgatgatgtgggttgctggaaaagtagtcatgcatttgtgatgtcttactattgaatgaaaaaaatatgagtttgggtgatttttgagaatttccagttttaatgccaatgggttgcgatccgctcttagtaagggtttttttgattggttttctactcaggacattgatgtgctgtgtgtgcaggaaaccaaggcgcagaggcagcagttagttggaccggatttttttccggctggctatcatgtgtgttttcgggatgcgacgactaagaaaggttatagcggggtggcgatttacagtaggtgtgagccagatgagcttcgcactacgctgggttgggccgagtttgacgaagagggccgttatgtggaggcgcgattcggaaatttgagtgtggtttcgttttacattccttctggttcttcaggggagcagcgtcagcattataagtttgaggtcatgcgttggttgcgtccgattttgtgcgagtggttgctcagtggtcgggattatgtgttgtgtggtgattggaatattgtgcgtagtgcattggatatccgtaattggaaatctaatcagaaaaattccggttgtttgccgttggagcgcgattggctcaatggtttatgtgccgattctctacatgaggttaatgcggctcaggggcgaggctgggttgatacttaccgtgtgttgtatccgcaaggtgaggattatacgtggtggagtaaccgtggtgcggcgcgcgttaataatgtgggatggcggatcgattatcagtttgtttctccaggtttgcgtgaacgtgtgtcgcgttgtgcgatttaccgtgagcaacgtttttcagatcatgccccttacactgtggagtatgtgttgtgagtgactattcggaaaagttcgatgtgcatgctgttctgcaaaatggacggcgttttctgactgtcttgttgcttggttttgcttcgggattgccgcttgcgttgactggaggtgcgatgcaggcatggttgacggttgaggggttggatcttgtgacgcttggttttcttgtattggttgcggctccttatacgttcaagatgctgtgggcgccgttgattgatcgattcgatgtgccgtggttgggacgtcggcgtgggtggattgtctttatacagtggatgcttggtggtgctctgtttcttatggggagtgtgtcgccggttcacgcgttgccgttgtttgcggttgttgcggtgtgtgttgcggctttgtctgcaacgttggatgtggtgattgatggttatcggacagatttgcttgagtctcatcagcggggattgggtggctctctggctgtgctcggctatcggttagcaatggtgttatctggtggtattgctctgatttgggctgagcaatggcatagctggccacaggtatatcgggtgatgggtgggtttatgtttggtggtggcctgctttcgttactgttaatgccgcgtctttcggggcatttcgtggctcctgtgactcatggtggacgcgagttattggggttcttggctttgctggttggtgtggtggtgggtgtgctgttgacgcgttatctttttatgatgtttggatttgatccggagagtaaagaaagttgggtccgttttctgtttgtaatgggagagattgctggtggggtgctgttggggttgttgtgtatccgttttgtgtgtttcgagacattaaatcgttcgttggcgacgtatttcgaaatgccgggtgctttggcatttttgggtttggtggtgctctataaggttggtgatgcttttgcgcttagtttatctactccgtttctgattaatggtgtgcattttagtcaaacggaagttgggattgctaataagacggttggtttgttgatgacgattgtcggtgcggttatcggtggtttttttctattacgtgtacgtttgtcgcgggctttgttttggttcggtgcgatgcaattagtttccaatttggggttttatgcattagcacgtgttggtgcagggttttgggggagtttggtgattccgagctttaatgtgttgattgtgcatcttgagatgccgacagaaatggatcgtctgttgttgtttgtgttgagtctggagaatttttctggaggtatgggtacggcggcctttgtggcgttgttgagtaatttgtgtaatgttcgattttctgcaacgcactatgcgttgctttcagcgtttgcgtcactcggtcgggttttcgttggaccatttgctggggtgctggctgatgcttgtgggtggcaagttttcttccttgtatctttattggtgggagtcccaggtttggtaatagcttggtgtatgcgtactgaaatagatgcaatgagctatcgtttttcagggtgagcgaggttggggggcgtctgtttgtcgatacatttaccgataaatatgtcttcagaatttaagtaatgagctatcagcagtaatcaaggctgtgaaggaagtcttgatatatgtgtgttgcttattgtgtgagacggctggatgggtttgttcttggttcaggctgggtggattgcgccgagcaaacgcaggccgcgtgcgccagtgacgcttggcaggttacctggttggccgtccaatgtttgtgcagccagccaagcaaaccccattgcttccagatagtccggattgagtccataggtttgaatcgattccactgttacgttgggtaggtgtgcggccaggcgtgccatcaatactgggttatgcgcaccgccaccgcatatcagtagccgattcgtcttgggttgttggcgtagtagggcatctgctacggtgactgcggtcagttcgagcagtgttgcctgcacatcggctggtgatggtggtgtaggttctagttgtttggtcacccagtccaaatggaattgttcgcgccctgtgcttttgggaggggggagggtgaaccaagggtcggctagcaggcaggccagtaacttctggttgattttgccgcttgcggcgaagttaccgctttgatcgaatgtctcgtgatgatggcgttgataccagctgtcgagcagtgcgttcgctggtccggtgtcgaagccgagtactgggccggtcatcgggatcagtgtcaagtttgcaatcccgcctaagttcagcactgctcggttttcattggccgatccaaggatcgctagatggaaagcgggcatgagtggtgcgccttggccgccggcagccacgtcacggcggcggaagtctgcgacggtagtgattccagtgagttcggcgatccggtgggcatcgcctaattgccaagtgaagggtagatcgccgtgtgggcggtggcgtatggtctggccatgagagccaatcgcacgtatctgtgtgtgctttatgcccgtttttgcgatcagtgtattagccgctgtggcgaaggccagtccgacttgggcgtcgagccagcctagttggtcaagggatgctgtgttctgtccttggcttagttccaacaatgtcgtgcgtaggttagggtcccaagcggaggtttgcgcggcaatcagctcacaatgtgttatcgcgtttgcgttaatccgtaccaacgctgcgtcgatgccgtcgacgctggtgccggacatgagaccgaggtagagaggtgctggatttggattgcagggatcatcatgcacacgcatacaggaaaggagctgaaagtggtttatgttgcccttattttgtcttgaagtcagtgtgtttcaaccacgtgtacttttctccgtagatttggagtcgtgtttgttggttattgcgtagaatcgtttttcgtattgttgaatttgtgcgattaacggggctgtttgagtgcggaatgcaattagatctttaccgcgtaaaggttctggtggtggcatcgtgattgacagtgggttgcgatgctggccgttcacttgaaattcgtaatgtagatgtggtccagtggccaagccggtcatgccgacgtagcctatgaccgtcccctggttaattttttggcctgctttgatttttccaaagcgcgacatgtgtccatatagagtcctgtagcctttgccgtgattgaggatcactacattgccgtatccgcgctgttggccgataaactgtacgcgtgcatcccccgcggccataattggggtaccggttgcggcggcataatccacacctttatgcatgcgcattgtgcctagaataggatggcggcgtaagccgaaggtggagctaagccgtgcatatgagattggcatacgaatgaagcttttcttcagtggtctgccgtccttatcgaagtattcgactttgccgtcgcgcataaagcgcatgcctgaatagatttttcctccagtgttaaaggtggcggccaatatcttggcgtcaggtaagcgctcaccttctcgccaagtttcatccatcaccacactgaagcggtcgccggtctgcaaatccttgtcgaagtcaatatcgtatttgaaaatttcatcggtcagcgtgatcacatctgctggtgataaacctgcttcgcgtgcagcgatccacagcgaacttttgatctcgccactagcaatgacggtacgggtgctggtctggcgttcgctaacctgttgatggatggtgttgtcatcaagagtcagttctacgcggtgtttttcgtcacgattaaaacgcattccgcgtaattgaccgtcgttgggtatatcgaaggagatttcatcgcctggactgagtcgggtgagtaacttacgtagatcggcgtaattcagcactcgttccatgtcgttactggatagcttgagttcgttgaatatgctgcttagcgtttgcccaggtttaattgtcaccattcgccatgtgtccgccgttgatgtgtatggtggcgggagggggagtgccaatgttgctaggcttgatagctgggtgggtgggctgttgttagataagcctgggatgattgtggcaattaatgcgcctatcatggcgaatagtgcggtgtggatccaatggcgtcgtgtccagcgttggttgaacgcagcaggaaacgtatgcttgagcttgtgatgtagggtggaaacgtggaggacatggagtcgttcacggatacgttgtttgtgagtgtgcctatgttcggcattttgcattatggaatttccttaaaacgatatctgcaaattaagctcaagcagggttaacataggcattctatccttgactcgtcaaaccattgacctcattcgtattgacctcattcgtaattttatgttccagatcaattgatcgtctattaatatattattaatgcaattaaaatttcattagaattttactactgaataatattatgtctttggtttcaaattctcttgctctcattgaaagaggtgctaatgagatacttaaattcgacgaattagagcgtcgcttgagaagcgggcgtccgcttcggatcaaggcaggtttcgatccgactgctcctgatctgcatttggggcataccgtcttgctgaacaagatgcggcaatttcaggagcttggtcaccaagttatttttctgattggtgattttactgggatgattggtgacccgactggtaagaacgttacccgtaagccacttagtcatgaggatgtattggctaatgcccgtacctacgaggatcaggtatttaaggttttggatcgtacccttaccgaggtgaggttcaattccgaatggtttgggaagatgagtgctgtcgatatgatcaagctcgcggctcagcacactgttgcgcgcatgcttgagcgggatgacttcgccaagcgctttgtttctcaacagccgattgtaatccatgaattcctttatccactgattcagggttatgactctattgctttgcgagctgatgttgaactcggtggtacagatcagaagtttaatttattgatgggccgagccttgcaagagcatcatggtcagccacctcaggtcgtattaactatgccgctgcttgagggcctggatggtgtggctaagatgtccaagtccctggggaattacattggtattaaagagccgcctatcgacattgttacaaaaactatgaagatcggtgatgatctgatgtggcgttggatcgaactgctgtcttttaagatcagcgccgctgaagtggttgcattgcgtgaagcggtcgcaaaatcggaactgaatccgcgtgaggttaaattacgtctagctcatgaacttgtgagccgtttctatgataatgcagcagccgaaaaagcaatcgctggttggcaagcggtggtgacagggcaaggtaacaacaacctgttgccgttacagaagattaatgttcctgcggatggggtgcgcctcgttgcattgttgacaaagtctggactagctccaagtaactctgaggcaatgcgaaagcttaaggagcgagctgtacgtgtcgatggcattgtagtggatgatgctcatctacactttgtgccagggtttgagggattaattcaaattggtaagcgcaactttgctaaagtcaggttggtgacttcttcggaatctcacgactttcctgagtctaatggtattgacaagagttagaaatatgtctgaactgatttttgatgtgcattcctattgcagtaggcgtttgagtgtatcttacaaactttggtggcttactactaaatgtattgatatgagttggagtccgtccttccttaaaatcatgataataaataaattctcctgttttctgcaatttatgatttgcatttggcgcagacattttttgagttattcataaggttgacttcataggttgacgattggttattaggtttggtaggggtttttgagtggttttaacttatagttgaatggttttgcattttttgtattttttctattgacgtggttgaagaagtggttatactggctgggtggagtagttgatatgttattcgaggcggcattgaagctggtctcgatttagttctttgaaaagatgcgcaggtaatttgtgtggacgcctgttggattgttttgtttatccatcttgcagacgttggttcgttttccagtttttcgtatttattattgatacgattttgtgctgtgagcgtattttggcgtatgcattgagaatgttttttgcctttgggcgcacaattttaagtgaagagtttgatcctggctcagagtgaacgctggcggcaggcctaacacatgcaagtcggacggcagcacgttggtagtaataccatgggtggcgagtggcggacgggtgaggaatacatcggaatctaccttatcgtgggggataacgtagggaaacttacgctaataccgcatacgacctacgggtgaaagcaggggaccttagggccttgtgcgattggatgagccgatgtccgattagctagttggtgaggtaaaggctcaccaaggcgacgatcggtagctggtctgagaggatgatcagccacactggaactgagacacggtccagactcctacgggaggcagcagtggggaatattggacaatgggcgcaagcctgatccagctatgccgcgtgggtgaagaatgccttcgggttgtaaagcccttttgttggggaagaaaagcaattggttaatacctagttgttatgacggtacccaaagaataagcaccggctaacttcgtgccagcagccgcggtaatacgaagggtgcaagcgttactcggaattactgggcgtaaagggtgcgtaggtggttatttaagtctgttgtgaaagccctgggcttaacctgggaatggcagtggatactggatagctagagtgtggtagagggtagcggaattcctggtgtagcagtgaaatgcgtagagatcaggaggaacatccgtggcgaaggcggctacctgggccaacactgacactgaggcacgaaagcgtggggagcaaacaggattagataccctggtagtccacgccctaaacgatgcgaactggatgttgagtgcaaattggcactcagtatcgaagctaacgcgttaagttcgccgcctggggagtacggtcgcaagactgaaactcaaaggaattgacgggggcccgcacaagcggtggagtatgtggtttaattcgatgcaacgcgaagaaccttacctggtcttgacatctgcggaactttccagagatggattggtgccttcgggagccgtgagacaggtgctgcatggctgtcgtcagctcgtgtcgtgagatgttgggttaagtcccgcaacgagcgcaacccttgtccttagttgccagcacgtaatggtgggaactttaaggagactgccggtgacaaatcggaggaaggtggggatgacgtcaagtcatcatggcccttacgaccagggctacacacgtactacaatggtagggacagagggctgcaatctcgcgagggtgagctaatcccagaaaccctatctcagtccggattggagtctgcaactcgactccatgaagttggaatcgctagtaatcgcagatcagcattgctgcggtgaatacgttcccgggccttgtacacaccgcccgtcacaccatgggagtttgttgcaccagaagcaggtagcttaaccgcgaggagggcgcttgccacggtgtggccgatgactggggtgaagtcgtaacaaggtagccgtatcggaaggtgcggctggatcacctccttttgagtatggtgaatataattgtcttatcaggcgtcctcacaagttacttgcattcagggtttgatgttggcataggtttgggtttatgttggcgatttttgttctgggggccttagctcagctggtagagcacctgctttgcaagcagggggtcgtcggttcgatcccgacaggctccaccatgaaagtatttatgggtctgtagctcaggtggttagagcgcacccctgataagggtgaggtcggtggttcgagtcctcccagacccaccaatgttatatcaattattctgaatgtggtttgcgcattttttatgcttatcagccttggagctgtgaagcgttcttttataatttgatgatgtagcaagcgtttgaactttttattaataatttctcattgcaagccttaagtggcaatgtttatccattgtcttatagattttgaggcaactttgggttatatggtcaagcgaataagcgcacatggtggatgccttggcggtcagaggcgatgaaggacgtggtagcctgcgaaaagtgtcggggagctggcaacaagctttgatccggcaatatccgaatgggggaacccactgtttaggcagtatctttgagtaaattcatagctcaaggaggcgaacctggtgaactgaaatatctaagtaaccagaggaaaagaaatcaacagagattccctgagtagtgacgagcgaacggggattagcccttaagctagtatggttttaggaaaacaatctggaaaggttggccataggaggtgatagccctgtatccgaaagggccgtactagtgaagatgagtaggacggggcacgtgaaaccttgtctgaatatggggggtccatcctccaaggctaaatactcctgaccgaccgatagtgaactagtaccgtgagggaaaggcgaaaagaaccccggagaggggagtgaaatagaacctgaaaccatgtgcgtacaagcagtaggagcccttataggtgactgcgtaccttttgtataatgggtcagcgacttactgttcgtggcgagcttaaccgtataggggaggcgaagggaaaccgagtctgataagggcgcatagtcgcgggcagtagacccgaaaccgggtgatctagtcatgtccagggtgaaggtgctgtaacaggtactggaggcccgaacccactcccgttgcaaaggtaggggatgaggcgtgattaggagtgaaaagctaatcgaacccggagatagctggttctcctcgaaagctatttaggtagcgcctcatatgtatcctctcgggggtagagcactgttatggctagggggtcatcgcgacttgccaaaccattgcaaactccgaataccgagaaggactgtatgggagacacacggcgggtgctaacgtccgtcgtgaaaagggaaacaacccagacccacagctaaggtcccaaattcatagctaagtggaaaacgatgtggaaaggcatagacagccaggaggttggcttagaagcagccatcctttaaagaaagcgtaatagctcactggtcgagtcggtctgcgcggaagatttaacggggctaagctatgaaccgaagcttggggtgcatattttatatgcgcggtagaggagcgttccgtaagcctgtgaaggtgagttgagaagcttgctggaggtatcggaagtgcgaatgctgacatgagtaacgataatatgggtgaaaaacccatacgccgaaagcctaaggtttccttgcgcaacgttaatcggcgcagggttagtcggcccctaaggcgagggcgaaagccgtagtcgatgggaagcaggttaatattcctgcacctcgcgtgagtgcgatggagggacggagaaggctaggtgtaccgggcgttggttgtcccggggaaaggaggtaggctgggtccttaggaaaatccgggggtccttttaaagtcgagcactgagacgagtcttttttagatgaagtcactgatgccacgcttccaggaaaagcttctaagcttcagctcacgaagaccgtaccgtaaaccgacacaggtaggtaggatgagaattctcaggcgcttgagagaactcgggtgaaggaactaggcaacatggcaccgtaacttcgggagaaggtgcaccctttttggtggcgcgtgcgcgttatagctgaagagggtcgcagaaaccaggccgctgcgactgtttatcaaaaacacagcactctgcaaacacgaaagtggacgtatagggtgtgacgcctgcccggtgctggaaggttaattgatggggttggctgtaaaaagcgaagctcttgatcgaagccccagtaaacggcggccgtaactataacggtcctaaggtagcgaaattccttgtcgggtaagttccgacctgcacgaatggcgtaacgacagcggcgctgtctccacccgagactcagtgaaattgaaatcgctgtgaagatgcagcgttcccgtggcaagacggaaagaccccgtgaacctttactatagctttacactgaacgttgagttcgtctgtgtaggataggtgggaggctatgaaaccgtgacgctagttgtggtggagccatccttgaaataccaccctgtcgtgcttgacgttctaacctagttccgttatccggatcagggacagtgtatggtgggtagtttgactggggcggtctcctcccaaagagtaacggaggagcacgaaggtacgctcagcgcggtcggacatcgcgcactgtgtgcaaaggcataagcgtgcttgactgcgagatcgacggatcaagcaggtacgaaagtaggtcttagtgatccggtggttctgtatggaagggccatcgctcaacggataaaaggtactccggggataacaggctgataccgcccaagagttcatatcgacggcggtgtttggcacctcgatgtcggctcatcacatcctggggctgtagtcggtcccaagggtatggctgttcgccatttaaagtggtacgcgagctgggttcagaacgtcgtgagacagttcggtccctatctgccatgggcgttggagatttgagaggggctgctcctagtacgagaggaccggagtggacgaacctctggtgttccggttgtcacgccagtggcattgccgggtagctatgttcggaagcgataaccgctgaaagcatctaagcgggaagcgcgcctcaagatgagatctcccgggatgtaaatcccctaaaggaaccatgtagactacgtggtggataggtcaggtgtgtaagtgcagcaatgcattgagctaactgatactaatgatccgtgtggcttgaccatataaccttaagttgcttttttggtatgtcagtgttttattttgataagcatgaatgcttcgctacgtcatcatttcatatgcgagaaggtgaatcttccattttttttaatgggttgattgcactctccaaccgtctccctggtgatattagcgctgtggaaccacccgatcccatcccgaactcggaagtgaaacgcagctgcgccgatggtagtgtgggtctcccatgcgagagtaggtcattgccagggtcttttcccctcaaaccctcatccttagctggatgagggtttgtttctttgtgttgtttatatcaacacttgaggcacacttggctgatcttcagctctctttctcatgcctgaactcccagaagtcgaaaccacattgcgtggactgttgccctatttgaccaatcaactgatctattctcttaccctgcgtaggcgtaccttgcgctgggatatcccttcccatatcgaaagtcgtctcccagggcatcgcatcactactgtgtgtcgtcgggccaaatacttgctgatcgatactaatgcagggggaagtctcatcatccaccttggcatgtccggtactctgcgcttactggcgccagaaacgcctctacgcccacacgatcatgtggacattatgttgaataaccgtcgtgtgctacggttcaacgaccctcgccgcttcggatgcctgctctggcaagaagatggacaaattcaccctctcctacagcgcctcggctgcgaaccactctcagatagttttaatggtgattatctttatcagtgtagccgtgctcgcaatgtgtccgtgaaaacgtttctcatggaccaacgcatcgtggtcggtgtcggtaatatctatgctgctgaaagtttgttccgtgccggtatcagccctctatgcgaagctgacaaaatatctctccaacgctatcggcgcttggctgaagtggtcaaggatatcctcctatatgccatcaaccggggaggaactaccttgcgggatttcctcagtcccgatggacgccccggctacttcaagcaggaattgtttgtctacggtcgtcagcaacagccctgtaagcagtgtggaagcctcctgcgtcaaaccaccatcagacagcgaactactgtctggtgcggccactgccaaggttgaagcatctgcgttccataggtgcatcgcctgcttccaccaggtagcgatgatcattgctgggtgtcgtaggtgatcatccttatccactaccgagcccgatgacagaggtgctagcttcaagtacaccgtgcttatctcaatccttgctctccgtatgacgcgtgcctgatgggtgatactgaactgctttggtgacgtagcatgagctcaatcattagtttgctcccaaaaaacgccagtactaaaaacatcatcgctgttaatgtccagtgcaccgccttgatgcctcgccagccataccgccagcgtccaattaacaaccctccaaatatcacccaggacagaacacttagcacactcttatgcaacaacttctgttccagaaaatctctcacaaacaaaaacccagtgaacacagtgaaggtcaacaggacgaaaccaaccgtgatcgtgcggaaaagcagcttctctaactcagtcagcggcggcagagcaccacgccagtggtgaacattgcgttgccgcaacgcacgttcctgaaaccacaacatcatcgccaatagtgctgctatgcctaacgtcgcatagcctagtaacgctagacaagcatgcagctccacacgccaacccagttccgggctgggtgagtgaccgtaaccgtgataaacagcaagcaataaccccgccagagggaataccactacacccaccgtccccatccccacatgtgtactaaataaaatggtcaagccagacatcacaaaaaatgtgattgaaagcgcagaaaaaaaatgcatgtccacagcaccagcattgcctaatatcaccaaaaaatgataaccaccgtgagctaatagacccaccagcgccggaatacgccactcacctctgcgggaaatatcattaaataacaactcacaaaacagcatccataccgctaaaaaatatgtaaaaaaaacaataacaaccaataacaacaattatcacctcatataatgtaaatgttctaatggaaatatataaagcaaacattaaagagtttgcatctcattgtcagaatgaagatgtacttcatgtgatgctatcctttaattttatagcattcaattttctgtaatgacacagctaatttctttaggggaataattgtttgatgaactttaaatccattgggaatttatataaattatgaatagtttatcatttttttctgagtcgatactttagtataaaaactcagaatttagatgtttatgactttaaagaattgtattttataaactttttaaaacagtaatagaggaggatgagtgatttatgtcacatcatatcctgagcggaacataactgggccgcagtacattttgactatagatgatgttgaatcgggcaatctcccctgatcgtaatgttttctgaaattttcgatgccctctttcctcattcgtttgctcacgctatttattgtcactacactgaatttatttttgtgtttgccagctaaagctgctactcacaagagtagcaaacttcaaaccatgcaaactcatagtaaatctaagaaccaaatgtctgtgttacttggtaaggcaggacagctaaacctgctatatgataagtactgggatgattcaatgagactcaatcccctacaggctacattgcaaggagatgcttatcatggagatagaatgcccaatttcctgtcggctgagttccggaagcagcaccacgatttcatcgagaaatggttgaagaaggttgagatggtcggggcggatggactagatggacaggcatttatcagctaccagatcttcgtgcgtgatgcacgtaactcgttgcaagccgagcgttatccgaactggatgttgccaattaatcagttttacaacatcgctaatgtggcagtagttcttggctctggtaatggtgcgcaaccattcaataccgtgcaggattatgacaactgggcacatcgctcactaggcattcctgcgttgttcaatcaagccattgtgaatatgcgtctaggtatgaaatctggtgtagtgcagccgaaagtgttaatggaaaaggtgattccgcagttggattctattatcaagccaactgcggaagaaacgttgttctgggtacccatccgtaatatgtctgtcaccttttcaaaggagaaccggcaacgtattactgctgaatataaaagtattattgagtatcagttactacctgcttacagagcacttcgtaattttattgccactgaatatcttccagtgtgtcgtgatagtgttggcttgagtggattacctggtggtgcgtcttggtatgcatatacagtgcgtcaaagcactacgacgaacatgacaccagaacagattcatcagcttggcttgaaagaagtagcgcgattacacgctgaaattcagtcagtgatgcatcagctcaatttcaatggttctatgcagaagttcttcagtttcatgcagaataacgagtattttacctttggtagtgagaaagagatgcttgcttattaccgtgatctcagaacacgtgtggaggcacgggtgccagctttattttcgctcgtaccaaaagctggttttgaaattcttccggtagaagcattccgtgcaccttcagcagcagctggttcgtatatgcccccgtctagtaatagacgccataacggtgtgttttacgctaatactaatgatttgtcttcccgtcgtacttggaatgcagaaaagctttttctgcatgaaggaattcctggatatcattttcagttaggattgcaacaggaattgcgtaatctccctaagttccgtcgattaggtggtgagactgcattcattgaaggatggggtttatatgctgaatctcttggtaaggaactcggactttaccaagatgcatacaactatttcggttacttgcaagatgcgctatcgcgggcaattcgtttagtagtcgacaccggtttacatactaaaggctggactcgtgcacaagtagttgactatattgtagagaattcggcaactagtcctatagaggctgaagccgaagttgatcgttatatcgctatcccaggtcaagcattagcctataaggttggcgaattaaaaatccaccaattgcgccagtatgcacaactggcattaggtccaatgttcgatctacgggagttccatgcggaaatactgaaagatggttcagtaccgctggacattctgcaacaaaaaatcgaacgctggattgctgtaaaacgtgccaatatgccatcaataccacatccaaagtcacgggatcagcgccgtaaatcgtagtcttacattacattgattgttatggagcttcgttatcactctatgaaatcagccaggcttgatctgataagcgtatttactcatatctatgtgctagtatttttgaactactgatctcctaaacattcaattttttgtcattattgaattatttatgatttttcgcattatggagaatatcctccgtctcatcatcgaatttgtctaacttgtattcaagggtattaggtattttatgtgatgaactaaaaattgaattcaaatgaagttcaattttcaagggggttacgagtggaattacctgatatttttatgagaaggttatttaaatcaaggtgagtcacgatactaatcattggaaaagtgagtatgtgatgaaattattttggataagaggtgattaacccattccaccattgatgccgatgacttgaccgttgatataacctgctttctctgagcatagaaatccgatcagagcagccacttcctcgggacgaccgggacgaccggttggtaccaattgcttgatcatttccggggtaaacgttttccccaccatctcactttcaatcacacctggtgcgacgacgttaacggtgatgccacgattagccatctcacgggccaatgagcgtgctgcaccgtgtaacccggctttggctgctgcgtagttactctgtccgcggtttcctaaaactgccgtaacagatgatatacagacaatacgtccccaacgggtgcgtgccatcggcagcagtaacggttgagttacgttgaaaaagccgtgcagagacacatcaatgacacgatgccattgtgtagatgacataccagccatcggtgcgtcgtcgtggatgcctgcattattaatgatgatctggattgggccagtctgtaacaggttttccagtgccgttttgctggcttgtgcggcggtgacgtcgaaaacaattacctcagcgctccccccttcggcacataagcattccactagggtatcagcacgagaccgatggtggtttgcatggacgatgacatgcgcaccatctgcaattaattgacggcaaatggcagtacccaaatgaccactgccgccagtcactagtgcacggaatcttggagagttatcagtaatcatagatacatgttccaagatcagtgggtagactgtgattgaagcaaaggttagccatcgtaaactgaactgcagggaggcaagcagacgatctacgattagcaggcgtacttaaacgtagatgtgtgattctctgccaagattaggtattcagaacaaacctttatcgtcttctgtgtttcttgttacgtttacttggatgcacagtcttgttgatgactcactaatcaactgttaataaatttccatgctgttcttcaggatgagcaatagaatagagatgaggaactgttttcaaatcctgttgttgtatgcatcgcttgtgtgactgaagtgggtggttcaccctatgtcggatgctcaggtcccgaatgtggacattgaaggtaggtgttgacaaatacttaatactatctgtcgagatgcaaggtatggattagcttcagaccgccgtgtatttcggagagttttgtgttcggagagggtgtctgcctgcacataaggctataatcgtaaatgttcttattatttcttgacgcccaactgggtgcgtttcccatgtctgaagttgttgctgaaacagcgcgccgccgtacctttgccattatttcccaccctgatgctgggaaaaccacactcaccgagaagttattgttgtttggtggtgcaattcagatggctggctcggttaaaagccgaaaggccgtccgacacgctacctctgactggatgacgttggaaaaggagcgtggtatctcggttacgtcttcagtgatgcagtttccgtatgagggaaagattattaatctgctcgacactccaggccatgctgattttggtgaggacacttaccgtgtattgaccgcagtggattcagctttgatggtgattgatgttgctaagggtgtggaggagcggactattaagttgatggaggtatgtcggttgcgtgatacccccattatgacttttatcaataagcttgaccgcgaaggtaagaacccaatcgagctgctggatgaggttgaacgcgtgctcggtatccagtgtgcgccggtgacttggcctattggtatggggaaacgcttgaggggtgtggttaatttactgacgaatgaggttcatctgtacgaacctggccgtaatttcactcgccaggactcgaccatttttacgtcgctggaagctcccggtttagcggaacgtattggtgagcaaatgctggctgatttgcatgaagagttggagctgattcagggtgccagtgcatgttttgatccaacagagtatcttggcggtcgccaaactccagttttctttggatctggtgtgaataacttcggtgtgcagccactgctggattttttcgtcgaacatgcaccttcaccgcaacagcgcgatactaccagtcgcgtcgtactaccgaccgaagaaaaattgaccggatttgtattcaaaatccaagccaatatggatccgcaacaccgtgaccgcgtcgcgtttatgcgggtatgttccggacgtttcaccgcaggcatgaaggcttttcacgtgcgtagtagtaaagatctcaagcttgctaatgcattgaccttcatggcttcggatcgcgagagcgttgcagaagctttccctggtgacgtgattggaattcacaatcacggtagggtttcaattggtgatactttcaccgaaggggaggtgctgtcgtttactggcattccgagctttgctcctgaactgtttcgccgtgcttgtttgggcgatccgttgaagctcaaacaacttcaaaaagggcttactcaactttcagaggaaggagcaacacagttctttcgcccactgatgagcaacgatctgattttgggtgcggtagggatgttgcagttcgatgtggttgcctatcgacttaaaaacgaatacggggtggatgcagcttttgaaccagtcagcattaccaccgcgcgttgggtgtactgcgataactcaaagacgttggaagaatttcgcgagaagaacgtaacgaatttagctgtggatgcttcaggagagttagtttatttggcgccgactcgagtcaacctgcagttagcacaggagcgtgcgccagagatacacttcttcgctacacgcgagcacgcctacgctgtaggcgtcgattgattgtgatttgagtcatcaaataaactcaatgataccaatataagaaaatgcgaattattcgcggttattgtagcctaccctcatgaatgcgaatgcccattcctctcttgattcacgtgatgagttagccagcgccatcatccacggtttgggtgcattggctacgttggctgctggatcggtactcattaccctcgtttctatctacggtgataggtggcagttagttacctcaattgtgttcagtaccactttattcttgttgtatgtggcatctaccctgtatcacgcaattccacatcctggcgctaaagcccggttgcgagttttcgaccactgcgcaatctacttgttgattgctggtacctacaccccgttcactttgattactttgcgtggtccgtggggttgggggttgttcgctacaatttggacactggcattgagtggagtggtcttcaagctcttctttacggaacgtttccgcctactttcgaccattgtttatgtggtcatgggttggttggtggttatcgccctcggaccattgcagcgcttgcttgatggttggacgctgcgttggttgcttgccggcggggtgctatacacacttggcacctacttttatcatcgcgatgaggtgcgttacttccatgcgatctggcatgtatttgtgcttgctgggagcgtctgccacttcattgcagtcactgctcaggtcctatgacagcgcatgatggtgttcttagctaccatccatggattacgtgattgaacctacagtaatttgaacaaaaaacctgacaagcgactcgctgtttggtcatcgactgttctactttgttcagaattataaatttagggcccaacggatatctgtaaaaccagatcgatctttggtcgccgattccatgacacacaccattttaagatgggcaataggctgtttttctattgctgttcacaatcaacaattgaggcggtgttctgaggaatctttccatcaataatttgttgtgggcggcattctgcaatgcctgcagcagtatcgataaagtacagagggcgtcttttagattcgtcgtaaagccgcccaagatattcgccgatgaggcctagtgcgatcaattgtacccctcctaaaagtaagatgaccgtcatcattgttggccagccaggtactcgatcgccgagaataagtgctttgagtacgatccagacaccgtagccaaaagcaaacacggcggttatcagccccaggtaggtggtgacccgtaagggagcagtggagaaactggtgataccttccagtgcaaagttccataatcgccagaaggtgaacttgctgcctccagacagacgcggttcacgccggtagggcagtgcgatctgacggaagccaacccagccgaataatcccttcatgaaacggtggcgttctcgtatttgacgcaacgcttgtaatgcgcgcggcgaaagcaggcggaaatcacctgtgtcagtgggaatcggagtaggcgataagcgtccgatcatccggtagaacgatgctgctaagaaacgctttaccagtccttcaccttggcgttccaggcgagtaccgtagacgttatcgtaaccagcacgccaacgtgcgacgaactgtggaatgagttccggaggatcctgaccatctgcatccagaagcaaaaccgcaccaaatggcgtgttgtccaggcctgcagtgatagcaatttccttgccgaagttacgtgaaagcttgattccaccgacacgtggatcattgacgaccaatgcttcaatgatgtcccacgttcgatcgttgctaccatcgtcaacatacagcagccgcccatcaagctctggaagagtattcaatgcagcgacgatgcgtagatgcaggagaggtagcgtttgcgcctcgttgtaggcgggaactacaacagtgaggcattctcgattcatatcgctgtatggtacgggtgcaatacggccgtcagctactgctggtgagggggaaatgctccgtcctggttttccttccaatctgattaacgtaacagggttaagtgtgtctaaatctaacatattgcttaagggcgttttacatacactgttttgtgtagagattgtgcgatcaacatccgttacccgtgagtcagtgtctgctgcaatagactgactaaccagtgaagcatccttccatcagtgacgctcaataatatggatagcgagtcaggtgggtgtgactttcaatccaaacaactgctccgtatttgcgcgagtcactttggatatttcagtacgatcttgtttgcgcagcgttgcgatgtaatccaagatcgtcagcagacgccctggttcgttgcgtttcccacggatttcgctgtctggttggtaaggcgcatctgtttccagtaacaaacagtccaatggtgtctccatcgccaattggtgcaaacggtgagcgcgtgggtaggtcatcgcccctcccaaactgatcatgaagcctagtttccacagttgccttgcctgctccaggctaccggagaagctatgtacgacgccacgcagtgttcctaccgtcttgattgatgcgatgacttcctcgaccgcatgtcgagcatgcacaatcactggcaatgcgtactctcgcgcaagcatcagttgacggatgaagtaagtgtgctgcatctccctgttcagtccttccaagtagaagtccaagccgcattcgccaattgcgcaggggcgttcgtgttctaaccagtctcgcaatgcatgtaggtgcgttgggtgatgttctgttagaaacatcgggtgcagtccgtaagctggatagagtcctgatgtttgcgtgcaaatggtgcgtagctttggccatttagctgcagtgactgcgggtatcacttgcgcaatgattccggcagcttgggcgcgtgcgattatctcggcacggtcgccatcaaatgcgtcggcatcaagatggcagtggctgtcaattaatacaacattcatcagtaatgcgttggcaaggtcaggtgcatgctgtttctactctgctgacgctaagatgacgagagcgaaataatcgcttcgttgttcagtggctctaaatcagtcagtgcaagattcaatcgttacgataaatagtgcagagttaatctgcattatggcatgccaaatgcaggccaccataaaatagtgaatagatgctgtcatcgccatgatggatgtatcgcaatacagaatgaccaggggctgaatttaacgtcggaggcgcagagattcattgctattcgttcaggttggtcgtgctggaatgccactgtgaaccaagtggctaggtgccctaggaatattttatgaacaatcagatgaggatggttttaatagctttgggagcattgttattaggtggagtagcaacagctgctttcatgaataaccgtggccatgacgtcggttatatggcgaatggacattcagacagccatacggcatttgagtatgcggatatcatacgtgttgatacgattaccgagaaaaagacgctgtatgctcaagtcgtgtcagtcgatccgattcgcgacacggccaggatgatggcaccgcgtgagatatgccgtgatgtgctagtgcagcatcgtctccctgagcgtgatggcaacgttggtggtacagcaatcggtgcattgattggcggtttggttggcaatcaatttggtcatggtaacggtcgcaaggcattaactgctgcgggtgcggttgctggtggcttcataggaaacgaggtggatcgcgagcatgttggcgggcgtgtggtagagcgtattgaacggcgctgtcattctgaaaactctatggtccaatcaagtcatgtcagtggctataccgtgatctatcgtaaggatgacggtactacggggacactacacatgagcaataggccgggagatcatgttgagcttggtcagacagataatgtggtgggttacgacgtgacttatctttacaatggtcaagagaaaacagtgcgtctgaatgagaaaccacttggcaatcagttgcccctcgtggatggacatttggttaaccagaccacagcgacggcagaccattccgtcaacattcaataacttgcacttttggtcgtcttgagtgtggtatttggatcaggtgcactaccacctacatcgcagcgtaccaatatggctgctcaccaacgtgttgtatcgtaaaatctcttagcatacgtaatacaactggactgtaaccgctgtaggtttccctttgagccgtttacccgagggaaagatcacgaaatcaagggtatgtccgtttgagtggaaattaaaaatatttcagttgtagtgctgtgctgtggcagatctcttattgttcccaggcagctctctcaaagacgaagacgcaggcagatcaagccatagataatgaatacccagtaccgctgtgactcagtcaatgaggggcaaattgcatcgtttattagtcatcaataagcggatgtttgaaagtacggttgacatcagaattagggattcgcaccagagcatattggccatctaatcgaggcgcaagaagtgtgatgatcatgagccaacattgttgagagcttctcagactcagttgagtgtcagcactttggaatactacatttgcagggtttactagtgctaaccaacgtaagtgccatatcaaagtggacacatcctcgtggataggattccttgggtagagtttctctattcgtaaagatttttattttttagtgcgtcactttaacgcaggcacgttaaggacagttttcgtttaaatgctcatcgacactctggaagcatccaggtgatgcatcgcaggaatagtactgatgctgtgatatggagataaaaggaaaaaagtcctcttcccgatggacatcggtcaggaagagagacagataaactacgatcaacaatgaatcagatgagcggtgctggtgtcatcggcaacgcaaccagagcagatttcttcttgcgcgccactggtttctttttagcaaccgcctttgtggatttcttggcgatcacctttgagggtttcttagcgatagttttctttatcgctttctttgtcaccttcttcaacaccggttttggggtattttttacagccttcttcgcggtgactgtcttcaccacttttctggaattttttactgccgctttcttcactgttgccgccttcttcacggccaccgcttttttcactacggctgtcttctttacgattgctttcttcaatgcaggcttcttagcactctttattgccttttctgcagcgatcttctttatcgctggcttcttggtgttcttcacggcctttacggcctttttcatggtaattttcttagcagcaacttttttcgtggccatgtgattggctcctcgtcagtgaactatgagtttgaatgcccagttgaatcaagcccgcagcagatgagtgccagagggaaccgaccgcatctggacacaacgcggaacgatatagaaatatccttatcgaatgccgatatggatgcctcagagacatcgacattgccttatcgctgactgaagccaacgaatgacaccactattggaaccatgttggtacacattcgatcctctgttcttggcttgatgttgattcgacctattctcttcttcatcaatctctactgggcgaaacctaatcacgctgttttttagtgtcaacactcacacacaaaaatattcatcgaaagcgtgtgctggaatagcataatcctctctgcaatccttcgctgtcggtatatgagactctgtgtcacagttccatgagaccatgtcattagaaagaaaaaggcttttttaaagcatttttttgtatggtttgaatcttgctgctatgactgaggtcagagctgcgtgtgtggatcacaccatcagtagatggttattgaacagttgaaaattagatccataattctgccattatgagtggatgtagggtgaaattgcgcaaaaaattttcacgttggagaccctcagcagcgtactggatgtcctctttgtatgcttaagagatgtacgcatgcatgatgcacacggagcatggatgatgcagcggtgtcagcagtccttaggtgattggtttacatcgctgcgtatgcggtgatatgcagcgatgcatatggtggtctgtaaagacgctgggaaggtcgcgctgcagaaattggcagcttctggtgggtgttcattgaagtgagcttcatggagcaagagacttcatctgattggcgactccggtccgatgcaagccttgtctgttgtatcgcaagtgctattcacttcccacagctaagccaatatccccaggttaattctgtactgcgttaaggtcacttggcttgctttactatcggcatcaccatctttcgagttcttttcaagactttcttaatgggaagccgctccaatcagtgggctagatagaagccgttccatctcacccccgcttacttctcggatctctacctcttgttgttttgcaagtcttattgggtgccacctttatctgctgttttactctgtgtatgtgtatttatattttttattgtgaatagcgtcacttttttcagattcttttgggctttctatgattcggatctccttaagtttttgtttaatgcttctctgttgaggatcacaatggattgtgatcgtctctccatagatcagcgtgtggctattgggtggtggggcatggaggaaaggaaagattcaatgttcgtcactttccagcactttggtgtaatcatcgggagaaagtagatcactaatctcctcaggggcttgcatctcaatgaccataatccagccttcaccgtagggatcttcattgatcgtctcaggtttgtcgcttaacgtagtattgacttcaatcactttgccggtgactggactgtagatatctgaggctgccttgaccgactcaatgactgcagcggtggtgccagcgtccaggtgatcgccaatattgggtaattcgacatacaccagatcaccgagcagattttgtgcatggtcggaaataccaacgatggcacgattgttgtcttcgatccggacccattcgtgggatttgaggaacttgaggtcgccagggatatcgctcatggaagaagtacatcgggaaggaggagatagtttaaccaacccgatattggataaggctgtttcaagagactatctgccgtgtaagcactgggtgtatctgtgtacagttatgcgttaagtgggtcgttggttagcaagtgccgatgagcatattttcctgggtgggttataggagttgctgtgagatgttgcgatgcggcatcgctaccacagacactcattgaatgtggtaagcattccaacgttgcaatatcgttatggggacggcgttgcccataagtccagtcttgccctcttcttggtgatgcgtttaattaggtgagtagtcggttgcgccttgttcctgtccatcacgcagtgaatgctgcgttgataagcgtacccagcatcgacacaggtcaaaaaagatagggttgtctatatcgaggctgctggcgcaccagcagcgcgagtggcaatgagcggcacacagtggtgatggtgaaaatgaggaaaatcgattgttgtagatcgatctttgttcaatcaaaaatgtttggttgcgtctggccttcacgtacaaaggggaatctgacaacccgcaccgggatttcacggtcacgtatgttgacccggacctcacttggttttccggctggcacgcgcgcgaatccgatagccttgttcaaggttggtgaaaacgtaccggaaaggatgtggccctcgccttgtgcggtcaatactttctgaccatggcgaagcactcccttctcatccatgagtaggcctatcatctgccgtgatacgccgttagtcttttgctgttccagcacgttgcggccgatgaagttgcgaccttcatcaagcatgacagtccagcccagtgcggcttcgtagggtgaaacctgctcgtccatatcctggccgtagagattcatccctgcctctagacgtaacgtatcgcgtgcgcctagtccgattggtttcacgcctgtcttcaacagcgcattccataacgttatcgtttcttcttgtggaagtaagatctcaaagccgtcctcaccggtatatccagtacgtgaaataaagaggatttttttcgagtgcgatgcgacttctagtgcagcgaaacgtccgagcttttccactgcgtcgcggtgagtctcggccaataggttggtgacctgcgcgcgcgcggcaggcccctgtacggcgagcattgccaagtctgcacgctcttcaacgcgtacgttgaacgcagatgcttgtgtattgatccatgctaaatccttttctcgtgtagcggcgttgacgataaaacgaaagtaatcttcacgtaggtaatagacgatcaaatcgtcgatcacaccgccttgcggattcaacatgcagctatacagtgcttttccgggtactttgagcttatctaccgaattagctaatagtcgacgcaagagggggcgtacctgtgtcccgtgcaaatcaatgacggtcatatgactgacgtcgaatatgccggcgttacgcctgacgtgatgatgctcatcaatctgtgagccgtagtgaatgggcatttcccagccgctgaagtcgaccatcttggcaccgagtgcccgatgagtgtcattgagaatggtctttttgatcatggagtacaggctctcatttttcttgcaacactctggatagtggggagtggacggctgtgcggtacttaggtctgagttgccatgctaggggcgccagtcacaccagatggcaatggatgccatggtgtgacttcatacgtatttaagtggggtgtaccttgagtgttgcgccatctaaagcaacgatccggatttgagtgccgatgggtaaatcaggaccagtgatatcccaaaatgtgtcgtctattttgattcgagcgttgccgtcaacgatagcgtgatcaaggatgatgacacgaccgactagctgatcagcacggcgatttagcagcggatggtcactgtcatgatcgacacggcggaaccaagtccggtagagatagattgaaacgaagctaagaacaacaaaagcgaacatttgcagtagcagtgaagtatccgggagcagcagcacgccgacgaacacagctgttgctgcaatccccatccacagcatgaacgctccaggtatcagtgtttcggcagcgagcaatagcagtgcggcggctgcccatcccatagcattccagcgcatcattcagcctcggtgtggtcgttgagacggtgtcgcactatgatccgatttacctaatgcttctctggtcaagtcggcaatgccggcgatcgagccgatgatccctgaggtttccatcggcatcaggatgaatttctggttgggagcagtggccagttctttgaatgcttcaacgtatttttgtgcaacaaagtagttgactgcttgtacgttaccctgcgagatggcttcggaaagtatccgggttgctttggcttctgcttctgctaagcgctcacgcgcttctgcatcacggaatgcggcttccttgcggccttcggcttccatcacggcggcttgcttctcaccatcggcacgaaggattgccgattggcgtactccctccgcttctaggatggttgcacgcctggtttgttcagccatcttttgttgttgcatcgactcggccagattatgcggtggctgaatgtctttgatatcgatacgagtgaccttcactccccacgggctggtggcgtgctcgacgacgctcaatagtttggcgttgattgtttcgcgttgacttaatgattcgtcgaagtctatcgagccaacgacggtgcggatgttggtctgtaccagtgcgatcattgcaatttctaggttggcaacctcgtaggcagctttggctgcgtcgagcacctggaaaaataccaccccgtctacgcgtactcccgcgttatctttggtgatgacctcttgactcggtacagccagtacctgttccatcatgctgactttgcgtccgacgctgtagataagaggaatcaagaaatggaggcccggtttcatggtgtcggtgtaacgaccgaatttctctacggtccactcataaccttgcggcaccatgatgacggatttgaataacaggatgacgccggcgaccagcacaatgagcgccaatacattatttggtaacatcgaaattccttttttatcaaacaataagaagcaatcagtatgcatgaatgtggtcactccagacaggataagtagtctctgaatgtctttgaagatgccggagcgattggtagggctatatcattttttagtggctcaagatgttgaaatgcgtcaataccttcgaggctttgcagcgctgctaagcgaaacgaatattcgctaggttggctgctaccgattgcaatcggcagacactaaagccattgcagcgtttgatctggcagcgacccaatagaatgcagtgcgatgtgtggtggcgtatcagtgccagtgttttacagaagcggcgttcttatggtgctgatggatcggtttcctgccggttaacagcgttccacagggcctgctgttctgaaagtgacatttgtgccagcgtagcgcctgcagcctgcgcggctgtttccatggcacggaactgtttttcaaattgaaggttggtatgacgtagcgcgttgcctggatctaccttggcgtggtgggcaaggtggatgcagatgaacagcagattgccgaatgtctcctcaatctgtgcttggttgtgcgtcacggtgtccattagaaacgtttggcggatctgttccagtgtcttctgcatctcgacgatggcagggattggggctgcttgcttgaaaccagcgcgcgtggcacgctcctgcaacttgagggcgcgtagccattctggtagcccgcttgaaatcccggccagtgcagaatgatcttgctcgttaacagcttcgcgttcttggcgcttaatggcctcccagtgagtactgactgtctttgcaccgtctacggtgatgtcaccgaacacgtggggatgcctgcgtaccattttgtcggtaatggcggtaattacgtcggtaaattcgaatgcaccctgttcggcggccatatgcgaatggaaaatgatttgtagcagcaggtcgccaagttcgtcttttagggcgtttaggtcgttgcggtcgatcgcgtcgacaacttcataagcctcttcaatcgtgtaaggcgcaatcgtggcaaagtcttgctctaaattccaagggcatccccggatcgggtcgcgcaggcgcgccatgatggattgcaacgtttcaatgtggggtgatgtgtcgggaagatcggacatacggaaaacgccagaatggggaatacgatggagtcacgccaaccaatcgcgccaaggcagcgtggcgtcgcccagtgcgataaaaccgttgttaagcagcgtctcgcgtttgttgtagcggaacggttttccagtctcaatgttcagcagcgtaccgcccgcagcaagcagcaagcactggcctgcggcagtatcccactcataggtagcgcctagacgcgggtacacgtcgagtgtgccttcagcaaggcgacagaacttcagcgccgatccctgcgaaactagggttatttctttcatctgtgccagtaacgccgaggtgtgcacatcaatgtgcgagcggctggctgcgacctgtaacgcggtgccagcaggtgcccgcacgtgcaatgtggtatcacggtgaccatcacggcggaatgcctgcccgccatgcattgcatgccagatggtcccttccaccggcgccaggatcattccatacacggggataccttcatggatcagtgcgatgttgatgcaaaactcgccattgcgtttcacaaattcgcgggtgccgtcgagtggatcgaccaaccagtagctcgtccagtgacggcgttcctcccaagtgattcccgtcgactcttccgacaacacgggcagactgggggtcagttgcttgagtccatgcacgatgatttgatgtgaggttaaatcggcctgcgtcaatggactcatgtctgctttgatctggacctggaaatgatcctgatagatctccatgatcgctctgccggaatcggtagcaatggcgatgaccgattcgcgaagatcgctgggaatagtgatcactgctgatgttccagccattcacggacaatgaacagtgctgccagggagcgcccttcggagaaatcctcacgcagcatcaaatcgtgcaactttgaaagcttccaaggaatgacctcaatctcttctggttcgtcgccgactagacgttctgggtacaggtcagatgccatcaccaaccaggactggtgattcatataccctgggacaagggtgatggcacgtagtacacgtagatcccgcgcaccgtaacctgcctcctccttcaattcacgatcagcggcctgctccggtgtttcgttggcatcaatacgtcccttgacaagacccagctcataacggtgaatgccagcagcatattcacgtactagcaggacagtctgcggatccagtagtggcaccaccactactgctccgtatcctcgtgcaacgtggcgttggtacaggcggcgttcgccgttggaaaactccaggtcgagctgctgccgccgaaattggctatcaccgatttcctcaatgcgatggatcatcggcagagggcggttcatgccagacacacaccggcaggagtggcatatacaatgagttgatgcatcacaatgttcatcaatctgaaatcctagcagatccatgcgatcttcagcgtgctgaacgctggctacaacgcgatttgcgcgtcctgtggcatccgtgcacgcaaatgcgtgagcatcccgacacgctgccattagtgcccatcgtccgtggtgagggtgcgtggttggtcggtcacgatgggcgtcgttaccttgatgctgtcagcagttggtggacaaatcttttcggtcatgcagatccccgtatcagtgcagcaatcgccgcacaggccaggacgcttgagcaggtgatgttggctggtttcagccatgagccggcggtgcgtctggccgaggccttgttgcggctcgcgccgcgccaggacgggcgtgagccgttgtcaaaggtgttttacgctgacaatggctcggctggggtggaagtcgcgctgaaaatggctttccattacttccgtaatcgtggtgaagagcaacgtacgcgatttatcgcgttacataacgggtatcacggagaaaccattggtgctctcgcggttggtgatatccccttgtaccggcgtgtttatgctccattgctcacggaggtattgtttgcgccctcgcctgatgcctatttggccgaaccaggtcaaagcgccgcagaatatgcattacaggccgccgaagcgttggaagtgctgttcaaacgttactccgggcaaatctgcgcgctgattttagagccacttttacaatgtgccggtggcatgcgcatgcaccatccggtgtacctacatcgtgtgcgggaactatgcgatgcacacggtgcgttgctgatttgcgatgagattgctacagggttcggacgcactggcacgctcttcgcttgcgagcaggcttgccccgtcatcctaacggatactgatgacaagcagcttggcatcatgccggacctgttgtgtctgtccaaggggctgacgggtggtttcctacctctggccgcagtgctgacaacgcagcaattgtacgaggaatttctcgatgacagccgcgaacgcgcttttctgcattcacacagctacacaggaaatccactggcttgtattgcagcgctaacgacactggatatcttcgaaaatgattgcatcatcgaacgcaatcaagtcactgccgcgcgtatgacgcaattggctgcgtcactgtctgggcatccgcacgttgctgacgtgcgccaggcggggatggtcgtggcatttgagttgactcgtgatggcaacaagcggacaccattcccgctacaggcacggcttggcttgcacgtttaccgtgctgcgctggcgcgtggagtgatcctgcgtccgcttggcgatgtggtgtattggatgcctccctattgcgtggatgaagagcaactgcatctgcttgctgagaccacgcgtgtggcaattgacgaagcgatcgcatgcgtttgagtcgttgtcatgtcaatgtgcccctgattcttggcaacgaaataatcctcccagaattggttgctaaccaccttttgcgtgtgctgcgtttatgcgagggcgatacctgtgtactgttcaacggtgacggccatgattatttagcacgtcttattgccactggcaggcgcgaggcgtgggcgcgcattgaaggcgtttccgaggtgtgtaatgaatcaccactggcgattaccctggtccaagcaatcgcacgcggtgagaaaatggatttgattgcgcaaaaggcaacggaattaggcgttgtcgcaatcgtgccagttgatactgaacggagcggggtgcgcttggatagcgaacgcgtagccaaacggctggcacactggaacaacgtggtcatttcagcgtgtgagcagtgtggccgcacgcgcgtgccagaagtacagatgccgcgtgcattgcaagcgttgccggaaatacttcatccggacacgttgcgcctgattctcgacccgaaaagtgaacatcgattgtcaacgctatcaaggctgacaccagttgcggtcaccattgcgattggtcccgagggtggctggtcgcctcgcgatcttgaaatactcaaagatgcaggttttatcggttttagcttggggccgcgtattttgcgcactgaaaccgcaggattaaccgccatcgctgtgttgcaagcacagcttggtgacctgtagggcatatgattgatgtggcatcttgcactggagtcgcatggcgactacaggcgatcacatgtgcggctctatcgttgattggttgtagcaccgtatgggcaacgtattgtttgttgtgacatataaagatgcgtgatgagatgatgagcgacgtgggaatcagtgattctcggccataaagtcattacagagtcagtgacaccgtcacatgaataatcgtatgtaaagatgggttattagggattttgatttttatattacttgatttaatgttctttgtttttgcaatcatgcgcagtcatactcttaaggtcagaatgttggtttgataaaatgtattctctatttaatttcgtgatgctaaatcaatcgacatcattttctggagacttgtagcttgtattttcttggtgagatcagaataagtatgatttcttccatcaccatcgatactgaccgatgattgttatcacatacttcgtatttaatgggtgcttagatacgacgatgattctgcggggtggggcgaataagagataggtggcggactatagaagatggtatatggtgattcccatcacggatctttaatgttgattaggcagcgatgttacagctaaatttggtgtgatgctctcataggagtagagattgaatgacgaaatcaatgcttggtgattcgtactgtttattgtcgaatgtataagctattacagaatgctattgtctttcagattgaaattcgccgtatgtggatatggacatattggaagaaactgttcccgttctctggagagggtggggattttttattcaattaattgtgtgatgaacagtacttgataatcaatgttagatttccaggggatgatctctatgccattgtgagaaaaatcatcgtggtatctataaatgtgctggagtctatttttagtgcttggagtagaaaagcgatgcttatatcagtctggttatgtcacgatgggtttgtgaatgtctctcattgaataaaaattaatcgaatggatgggttctttaaaggaggtttgaattttttatattcctcctgttttgaatgtccaggtcttctctttttatatcagaatgattgtctggatggttttttcagcatcaattgagtggatgcagttgatccagcatctatgacgcagtatctcgtaacggcgatggaagtccaatagagcctggccaatgtggtgctggtggtgtatctcggtacattcagttttgatgaaggggtcgcttcgtgggggctgtgttggcctggtaagttcatatcaccacgatagcaacgactcctgtagactatcggtgcttgcatagcaaccgtcctttttcctgcaggatgccgtgcgcttgacacgtttgcgcgccgctcctagtccgattcttttcgccttgcatgccgatcgtacgctttggtgctgcgttcgtccttattcatttttctcgcagcgcggtttacgggaacgctccgagctaccacggtacgatgcgtcggttttgattggcgcaagtgcaagtgcttttcaggagtgttctgaatgaacttcgaaactttgggattgttgccttccttactgcgtgctcttagcgagcaaggttacgaaatcccgaccccaattcagcagcaggcgattccattggcattagctggccacgatttgcttgctgccgcgcaaacagggacaggtaagacggctgcgttcggcttgcctgtattgcaacgattgatggccgcttcatctaatgttggtgcgggtaagccgcgtgctttggtgctgacaccgacccgtgagctggcgactcaggtctacgacagtctacgtggttacgccaagtatcaacgtgtatcaagtgcggtgatttatggtggtgtggggatggggaatcagttggatgtgctgcgccgtggcgtagatttgttgattgcctgcccgggtcgtttgattgatcatattgaacgtcgcagtgtggatttgtcaggcgtcgggattttggtattagatgaggctgatcgcatgcttgacatgggtttcctcccctcaattaaacgtatcctcggcaaactaccgcggcagaatcgccaaactctgctgttctctgcgacatttgctgagccgattaaacagttggcgttagagtttatgtgccgcccacgcgaggtgatggtggcgtcgcataacaccgttgccgagaccattacgcatcgtgtgcatccggtcgatgttagccgcaagcgtgaattgttgttgcatctgttggctcaagatagcagggagcagacactggtgttcgtgcggaccaagcatggcagtgacaagcttgctacgttcttggagaaatacggaatcaagacagcggcgatccacggtaataagactcagggccagcgtctgcgtgccttaaacagtttcaaagcagggcgagttaccgtgctggtggccactgacattgctgcgcgcggaattgatattgaccaattgccaaaggtgatcaattacgatttgcctatggtggctgaggattatgtgcatcgcatcgggcgtactggacgcaatggtgtgcagggagaggcaatttcattagtcactcaggaggacgctaagttattgcgtcagatcgtgcgtttgcttgatcgtgacatggatattcgcgatgtaccggatttcgaacctcaagtcccgatccgttggggtaacagtgctccgggaaagagtaagcagcctgctggacagcacccaccacgtaagagtcaacatcggcgagcattcggcaaagcgtctgtgcagacggcgcatgctttaacaaaacaatcaggcgtacaacatagcaatgggtcccgtaatcgtgatggaatgtttccggttcatcagcgtggttgatcttggacttacatattggtaatcacagcagagcatagtgccgctatgctcttactgcattttcgttgcatgacagcactatggatatttttaaggtcttcattatcgaagcagcacaccgtttgcctcatgttcctcctgggcacaagtgtgctcgtttgcacgggcattcttttcgaattgaggtgcatgtcagtggtgcattagagtctgatactgggtggatcatggatttcagtgatttgaagcgtgctttccagccgatttacgatcaacttgaccatcattacctcaatgaaattgaggggcttgaaaatccaaccagtgagcggttggcgatgtgggtatgggaccggctcaagccagtgctgcctgcattgaccgagatagtggtgcatgaaacctgtacttcgggatgccgttaccgtggtggttgattcacctcatcaagatattgtcgtaggaatggtggatctgtctctaatccctggaaaatcgaattactgtcatgtagaacgtgcttctgattcgatacgtcctaagtgatatttgtcttggatatgtggtaaagcgaatgattggtagcgccgagaaatcttgagtgttttgatcgtgctaaccaatgagtgttgcttctattctgcgtgtcgcgttgatgtcacaacaggatatcgtcagcgttactattcattgaaattctcattgatgttcgaacagattgattatcaatgctttgtgtgttgttacatgcgttagttgtttcttattctttatgtagatcactgagatcattggttccgttagagtttctttttaatcaagaatgtcatatccatcttctgcggtacccttggaaagtcagtcaatgatccttgattaacttcatgatgtaattcgcatgtggacatgaggatgtattagtcatggtgatgcacaccgatgaaggttcacacggtgtctatgctggtcggtgcattgacttcacgttggttgtgcatttgatgttgcccatctatggcgatgccacaatgttgtttcgttgttcaaaatatgaactacgcatcatgcaggatgtgatgtcctgtagttcaccctcaaagattctgggtcaacataagcgtgtctaatacaagggccaactatctgtccggccctttctgcaagtgggttcgtgaaataccgcgtcatgtttccgcagccctctttgagcgcggaattggcggcacaccctaggagcgaggtaggactcttcagcttgtttacataagccgtgcttggacaaagcttggcacacgttgttgtgccattgatgcttgtgcttgtacgctctgttggtgtgccgtgcctgccaggattggtcaaggtttcatcgaagacagtgatgactatccaagattgagtatatgccgatccagtgtccaagccttacgttgttatcgttgatgtcgacagatcctttgacttatatctgtacactctgatgaggaacgctgcttctcggttatacgctcattttttgtgatcttgtttcggtgcattgtcgattttttcaagatcttgcatcagatcatccgttaacggtgccatctttttctggattgcgaccatcaggttttgcatcaataccggagttttgtcgagcaggctttgccctgctgagctttcgtagaatttagtcattgcaagcacatcttcacggctgaaactgtgcttgtataagtctatgtacactggttctagttctgaccatgacattgctttgcggattctctgtttggagcgttccaggatttgcaccatttttgctttttcttcagtgcttagagtgtgttttgcggccatctggtcaaattgtttctcctccattgtctcaagctgaggtatcatcgaatcgtgtatagcctgcatgcgtgaaactgatagcaggcggtttacatctgcatcgctgggtggcgtggctgtggcgactagaggcatggcaatagttatggcaatgaacaaagcaaggcagcggagtcgctgtaatgtggtcatcgatgtatctcctgagtaattaatccctccccatcataacgtattgtgatacgcgttttggttactttgccgatacaatggcggcgtgtgcgatgattctctgttaatatgacttgtcaggatggttcctgacgaggggattgctcagaggcttgcgtgtgtttccgatgcaggcgagaaaaatgtcaacacggttgtgtcatgcagtggggttactttttatcgtggatggcttgttgtttcagctcgatgtgctgtgtgcatatcttgggcacttgtaatgatcgactcttgatattgggcgaaggtgcattgattatctaatgttaattgcttccgttcttagagccatcgcagtgaggatgcttgtatacgtttagcctatatcatcaatgctgtttgtgtagcaccaaagtgttgtgttgctatgcgatccagctctaatatccggttgccttgcatcaatgccgagtgtgagtttagcggacgtaagtgcgggggtttttcgttttattgggagtcgcagtgattcagaccgaaccgacgttgcctccggtgacccagatcgatcccttgcgagaagcatttccagagaatatgccgtgcatgcatggccccttggttcgttggttgggccgtactgtgcttaaagtgggcggttggcgcctcattgggcgcctccccaatcagggtaaggtcgttatcatcgttgctccgcatacgtcatattgggacggttttttcggtttcgcttgcaaatttgcagtgggtgttgaaatgcgctcgctcatcaagtccagcttgttttggtggcctttaggcgcgttgctgcgttgggttggctgtattcccttggatcgtcgccttcctcaggggacggtgagtcaggcagcacgtgcgtttcgtgactccgaacgtatgtggtacatgcttgctccggaaggcacgcgtaaccgtgtggagcgctggaagcatggcttctggaagattgccaagtatgctgatgtgccgattcttccagtgtatatggattatcctagcaagacaattggtattggtgatcttttttggccaagcgatgacatggaggctgatattgctgcaatccgtgcttggtacagcccttgccgtgccaaacatagcaacaggctttaattaataactgccttggtattgcggcgtttgggcttgccaatcatcgtgctgtgtgatagtggtgtggaaaaatcgccgcatttttcgttgagtagccaaaaattttggtgcagttgttctctggatcgatttattttattttaaatttctttgtttgcttgtggtgatagagcttcttcttgcttggcttaaagtcaattactcactattgctgcatttaagttatatcggtcattattcatttttgatgatgacagtgcgctggttttgaatggcactgaggcagatttttttatagaaaaaatattaatcttgggatggcatgaagtatcaaggattatggatatggggcgtctattcgagcacgtgtggtttacttttgatggcttgatgcaagttcctaaagtgtttggcgatccagcttggttgtaatgctccgccatacataacagcaagctacgcatgacctttacttagatgatggatacgctacttctttgcggtactgctgtgcgaatcagctaatgatgaggaggtgttattcccttatcaatattgcgactacaaacaggcagaaatacttgtggtgtgatgaatgatttgatcttagatcatagccgtggcgacttagctgcgtcttcgtgttggtctatagttcgtctgaacgggatgctatctggtgatactgcgccaccggagatgatgaaactcattgcttgatccacgctccagttggtcggagtgagttgttctacagggacgatttcgagatagccagaggtgggattgggcgtggttggcacgtagactgctgccagttcctgtccagtgtcccggtcgcggatgacccgtgttaccaagccaactgctttcatgtctcgatgcgggaaatcaatcagtaccactctttgagtgctacccggttgggtttgcagaatgtctaatagtttgcgggcgctgtcgtagatgacgctggcgaatgggatgcgacgcatgattgcttcgaaccagtgcagtaggcgttgcccgatcatgcgtcggctgagtgtccctacgaacaagatggctagcagtgtgaccccaagagcgattgtattttgcacccagagggcttgaatccagccaaggtagtcaggaaaagaggcggcaatgcgctcggacagtggcacgacccaaggactgctgacacctgagaggagcgagaatacaaatttaacgaccacccatgtcagccataccggcagtagcgtcaataaaccggtgaggaagatgcgttgcagcgaggggcgttggggaagtgaggagggatctgcggacatgctgttattgtagggaagagtgggtggcgcaggtcaataaagtctcagtctattgctcatgatcaggatgtcctgatgatttagattccggaattactgtcgtttggttggtttttccggatacaggctggtattttgttccttacagaggtatgggctaatagattcttgagccgtagcgttttttaatggtgctggttaatgccgatttttaggcaggatatgcaatgttgataaagcacacagaagttcaagcgtgtcattttctaaatgagtgatctggattgctagcactgatgctcggtgatgattgataactattagtggtcacgtgttttgtttcgggcgtacatctggagtccagaacttctttgctgggagtagttcggtctagtgagggtcagggacggtacgtgtgcggtaaggggcacccttttaattgtgctccaatgctgttgtatgtccggcgagcacaggtgacagccaacaatgtgagccaagtgcggtgaatccggctgcggtgaaacggcgccgataccagcgtgcttggcgtgactgaaagcctgtcgtgtcgccttcgaatgcgtcttcggcagtgaagatttccagaaatgcgacaccgttgcatagttccacaagtcctgggagtgcgcgtgtcagttcacgcgttgcaacgtaatgcagtacgtctgcgcatacgagcaagtccaccggagcacatggacgtagccaggaaaaatcaccgatctgtgctagatgcaggttgcgttgcaagccatagcggtttaccgcgtagtgactactatcgaaccctagataatgtatatgtgggcgtagcctgagtaatggtttgcgccatgctccctcgccgcagccgatgtccaggacactgcggatcggccgttccaagtaatactccgcctgtgatactgctagtgcgaccttgcgtctcagtcgtgctggactgctcagttttgtttgacggtaccactggtcaaaatagctatgatcatacgatttacctgttttgaacacttgtttccgatgcgatgttggtaaaaatgccgagtatcctaatgtgaatcgacggagttaacgtatggctttgtatttttgggtcaagactttccatctactgtttgtgattgcttggatggctgctgtcttctacctgccgcgtatcttggtcaatgttgctgaaaccgatggtcagccggcggtgcaggcacgtctgaggcagatggggcggcgtttatacatctttggacacatcatgtttgggttgagtggcttacttggtgtgttgttgtggttggggtatcgggtgattcccgcatttccgacgatggtaggagatggaagcggttggctgcatgccaaggttgggttggtcgtattaatcctggtgcattacatcgtggctgggtactggcttaagcgggccgagcgtggcggcgtgctgccgggggcaggtgcgctgcgcgtgttcaatgaaatcccggtgcttgtgctgatcggcatcctttggttggtgtttgccaagcctttttgaatcagcttcattcagtgcggttagagtggcggatcgcctccattgggctttgcttaattttgtcgacgcatagcgttcgcgccgccgtagtaggttgctggtgattgggatgtcatttttcccgatgctatttaagtctctttgagccgctcagtacggggcggctcaatggttctcgtaggccccataagtgcgcaggcgtttgtgacgctgatttagaagtgttaccagcggaactttatccaatgcttcgagttcattgagtaatactgctttcaggcggttcgccatctgttgcggattacgatgagcgccaccaatgggttcgcggatcactttgtctattagtccgaattctttcagtcggcgtgcagtgaggttgagttgttcagcagcatcgctcgctttggcggcatctttccataggatcgaggcgcagccttcgggggtgatgacggagtatgtgctgtactcaagcatcagggtacggtcgccgatgccgatcgccaaagcaccaccggaaccaccttcgccgatcacggtgcagatgacgggaatttttagctcggccatttcaatcaggttggtggcaatggcctcggattgattacgttcttcagcgtcgataccaggccaagcacccatcgtatcgatgaaagtcaacaagggaagaccgaaacgctcagccagcttcatcaagcgcaatgctttacggtagccttcgggtttaggcatgccgaagttgcgcatcaagcgttctttgttgtcacgtcctttttgatgaccgataagcatcactggacggtggccgatgcgggcaagacctccaacgattgctttatcgtcggctaaggcacgatccccagctagttcttggaattcgtcgcagacaacggagatgtaatcaagggtgtaaggacgccgtggatgccgagcgagttgtgagatttgccaagccgataaattacggaagatctgtgcggtacgaagacgcagtttgttttcaagcgcacgtacttcggtgtcgacattgatagacggacccatactggcggtgtgcagctcctgaatcttggcttccaggtcggcgatgggttgctcgaagtcgagatagtttggattcatggcaaaccgtctttgacgtagggtggcaagtgtagcggaataacgttgcaatccgctgtggattgcttctgtgtgtgctctgctgtggtcttgttcattgcacccaaggtggcgtgtatttgaccttaagcgtagatacggcgggatctttttgcagtttatccaagagtgattgttcgatacgtacagactgggcgccactcaagtcgagtgtgccggcgacggggccgtgggttgaattcagcaacaaatcgagacgtaatggggtgttgccggggcgatagcgtgccaggatggcatcgattctttcccatgcgtcagaggtgcgtaggtccacgcgtagcaacaagcgttgcgcatagtctgtacagagttgcgtgtaatcccagcattgacggatccgtaggctgtagccgtcgttgaattcatcttcccgcagaccacctttgacgatcagtatgcggtcacgggtcaacaggtggccgaactctgccagggcgtcggagaacgcactgcattcaattcgaccgcgtccgtcttcaagttgtacaaatacttggctgtctcccttacggcgcacactgacgaccaatcctgcgagaatggtgttcacctctgggtgccaagtacgcttttcaccgttgccgcgttgttgggaacccaggattctttcaagcgcactggtgtttagatcgcaaccaacaagttccttcacttgtttacggtatgggtcgaatgggtggccgctgaagtaaaggcccagcgtctcccgttctccattcaacatgcgtgttagcggccattcttcgcattctggaagatctaattggatggctggcgtgctggggtctgcgttgccgaaaagcgggttttgcccggactcgcgttctctggacatttgttccgttgctttgatgacttctggcagttgcagcatgaccgaggcgcgatttttacctagctcgtccagtgcgccagcatggatcattgcttcgagtgcacgtcggttgagtttggctgaggcgacccgggtacagaaattgagcagtgacgtatacggaccgtagtgcaacctttctttgacgattgcctcgcagacgctttggccgacacctttaatagcgcccaggccgtactggattgtgtcggcgtgagtcgcctcgaacatgtagactgagtgattgatgtttggtcgcagcaccttcagattgaggttacgtgcctcgtcgaggaagccgacgactttgtcggtgttgtccatgtccgaggacagcgtggctgccatgaattcagcgggataatggcgcttgagccaagcggtttgatagctgaccagcgcgtatgcagctgcgtgggatttattaaaaccatagccggcaaatttctccatgaggtcgaagatttcatcggctttgaccgcgtccatgccacctttggcagcaccctcgcggaagatctcgcggtgcttggccatctcggcaggtacttttttacccatcgcgcgacgtagcaggtcagcgctgcccagcgagtaaccgccgacaatctgggccatttgcatcacttgttcctggtacaccatgatcccgtaggtgtctttaagaatgttcttcgtacgcgggtcgggatagatggtctcttgcactccgtgcttgcgcgcggtgaattccgggatcaagtccatagggcctggtcgatacagtgacaccagtgcgatgagatcttcgaagcggtctgggcgtgcatctttgaggaggcggcgcatgcccgaggattcaaattggaatactgcgctcgtgttccctgatgcaaaaatgtctttgtaagttgggatgtcgtccaatggaagtgcggtgatgtccactggatcaatacaggcgcgggcgtggcgtttgttgattgccttgaccgcccaatcaatgatggtgagtgtgcgtaggccgaggaagtcgaatttcactaagccgacttcttctacgtcgtttttgtcgaattgggtgacggggttcttcccgcgtccgttttcgtcgtgttctgcaaagagtgggcagaattcagtgagtgggttcggtgcaatcacgacaccgccggcgtgcttgccagcattgcgggtcagatcttccagttggcgtgctaggttgagcagctcctgtacgtcctcctcggcctgatagcgttgtatcagttctgctgaggcgttgtcgttggtctcgccttcgcccatcgcatctttcagggtgatgccaagggtgttcgggatcagcttagcgatgctgtcgaccaggccatatgggaaacccaatacgcgaccgacgtcgcgcaccactgctttcgcagccatggtgccgtaagtaatgatttgactgacccgttcgcgaccgtatttgcgtgcgacgtagctaatgacctcatcacgacgttccatacaaaagtcgatgtcgaaatccggcattgatacgcgttcgggattaagaaagcgctcaaacaacaagttgtatggcagagggtccaggtcggtaatcagtagcgtccacgcgaccagtgagccggcaccagagccgcgtcccgggccgatggggatgccttgttgtttaccccattgaatgaagtcggccacgatgaggaagtaaccggagaaccccatcttgatgatggtgtccagttcaaattccagacgggtcacgtagtcttcgcgtgtctgccctggtgctaatggatgtttcagtaggcgtgcttccagaccttcatgcgactgtttgcggatccaactgtccaacgtttcgtcgttgggaacggggtagttaggtaagaaataggtgcccagccgcatctcgatattgcagcgttgtgccaaggtgcgggtgttgtccaaggcgtctgggatgtcagtaaagagtgccgccatctcttcggaggaacgcagatactgctgttcgctgtaagtgcgtggtcgcttgggatcatcaagcatgcgtccagatgcgatacagacgcgcgcctcgtgtgccagaaagtcgcttggtaccaggaagcgaacgtcgttgctggcaatcaccggtatgccgcggatgccagcgacttggagtgcaaattgattgaatggttcttcgccatcgcgtccagtgcgtgtgagttccaggtgcaaaccgttaccgaacacgtgttgccagtcggctagttgctgttcggccagatcagcgcgacctttagcgaatagctgtccggccaggctgtgacgtccgattagggcaaatagatttttgtggtggtcacggacccagtccgggtgcacggccactcctccttcagggcggtgaccttccagccaaccgcggctgatcagttgcgatagattcaggtagccagcgtgatcccgacacagcaatgtcattccccacggggtgtgctctggttcggcgatgaggagatcagcaccgctgatcggcttaatgccgacggtttcagcggccttatagaacttaatcagtgcgaacaggttgttcagatccgttactgccagcgctggcagtccgagttcaacggctctgctgagtaggttggcttgtttggcctttttcgggtgagcctgttctggtttctcgggcacgcgaatcgttgaatccgctaacgagaattcagtgtgaatatggagatgaacaaatgaagacgtggacatgcctgaccggcgcagtaatgcgtcaggcagagtagctttgaggagaggagggaacaagccttgacaggggcagtctttagtaaggtttaaggggtgtcatcgtcatcgtggtgaagagtaagtggcgcgaacaatcttcatcggatacgtatattccctggcgagcgcgcaagtgggagctgtatttacatggtttggagtcatccgggtcagcagtacgtcagcggtgtgtcatggtgtggcttctcgtgtggtaggggctttgatatggacgagtgaatacaggagtcaatcaatgttgattcctgctagttgctgtagcgctttggtgtacttggcccgggtacggtcgatgatgtcttgcggcagtgttgggcctggtgcggttttgtcccagtccagtgtttccaggtagttgcgtacgaattgcttgtcgtaacttggtgggctggtgccgacttgatattcgtcgattggccagtagcgcgatgagtctggagtgagcatttcgtccatcacatagaggcggccatcaatgtcagtgccaaactcgaacttggtatcggcgagtaggatgccgcattcggctgcgtacttggcggcgaagtggtaaatgcgcagcgtggcgtcccgcacacgttcggcgagttcagcgccgaccatcttgactgttgtgtcaaagtcgatgttttcgtcgtggtggccaactgctgctttggtcgatggggtgaagatggggtcaggtaatttctcggcttcttgcaggccgtcggggagctgaatgccgctgactttcccggtgcgttggtaatccttccagccgctgccgatcaaatagccacgtgcgattgcttcaatccttaccggtttgagtttctttgtcactacggcacgctgggtgtagagcgttttgtcaatgccgtcagggagtacgctagcgacgttgatgccggtcaagtggttcggcatcaagtgctcggttttctgaaaccaaaagttggagatttggcacagtatctcgcctttcccggggatcggatcgggtaagacgacatcgaatgccgagaggcggtccgtggcgacgatgagcaggtattcaccagatcgcgtgtcgaccggcaagcgtttgtgtggaatgtcgaatacatcacggactttgccgcagtgacgcaatggcagaccgggaagatcggattgcaacagcgtagtcagcaagacatgctcctaattcaagtggcgtcgtggtaccccattatccgtggagcgatggaaaacccccacggtagacgaagctcctagtgtacggtgattttacttagttcgtagccgattctatgtgctgttggcggcggtgtgggaatgttcttgaggttgcctagagcattttcaagattcactaaatgctgtacttcaaaatgcgttttttttctttgcgatgatatttgcagaatgtggtgtcgtcgcgacggggtccaagtaggcgacaaggtctcgtgcaaagggtggtgtttcggtcaatggatacgatgtgtttgtagtggtgatcgtttcaccagtggagtgtcatcattgcgggagtattactagcctgatgcggtagagctgtctttgaggtttgtagtttttaaatttaattggctaactattttttaggtgagattttattcatgatctttcttaattaatgcgtgagttttgacgcggcttggctagaatatctccccttaattcccttgttggctcgccatttgtgatgcactggtacggaaaattgtttggtttcattattggtgcactgttgtttcgacccaatccggtatttggtgtgttgatcggtgtgttgatcggtcacgcggtggataagaggcgcttgaggcatccagaggatgatccataccgcgtgatgggattgggagcgggggctacgaatgccgagatcgagttggcgtatcgtcggctgatgtctaggtaccatcccgataagttggcgcaggcttcaccgcagttgcgtgagcaagctgagcagaaggtacgccagatcaatgctgcgtatgatcgtattcagcgtcgctgtcggcgttgatcttggctcaggtatcgggtcattcactttcctcagagcgtttcatgtccaattgtctgattgctccatccattctttccgctgactttgcccgtcttggggctgaggtggatgctgtacttgcggcgggtgccgattggatccatttcgatgtgatggataatcattacgtaccgaatttgacctttggcccgatggtgtgcaaggcgttgcgtagttacggcatcactgcgccaattgatgtgcatttgatggtggagccagtagaccggatcgtgccggattttactcaggccggtgccagtatgatcagctttcatatggaagccagccgtcatgtgcaccgtactattcagctcatcaagtcccatggttgcatggctggcttagtatttaatccggcgacaccggtcgatatgttggattgggtgctgcctgaattggatctcgtcctgttgatgtctgtcaatcccggttttggtggtcagaggttcattcctgggacgctggataagctgcgcttggtgcgtaaaaagatcgatctgcttggtaggcctgtgcgattggaggttgatgggggggtcggcattgacaatattggcgcgattgctgaggccggcgctgatacctttgttgccggttcggcgatcttccatgcacctgactatggtgatgtgatagctcacatgcgtgcagcggttgcggcggttaggtgaggtcctcgtatgtgttgggtgtggtgaccgtcgtatcgaacggtgtatgccgaccctatgtcaatgagtgcatttgcacactactaatgctgtatttgtagggtcagtgtgtgacactagatttggctctacagggctgatgtgatttccatacttgccagtaagaacgagcatggttgtatgggtgccctgcaaattgatgtgtgattttttcgcgatggtgcttgtgtgacattgaacttgtctggctttgttggaatggttgctgcttgggtgattgtcactcaagaaagcggatgtgcgtcctgatgaggcgtgatgcggtggggttaaatatcggtacggttatttctcatccttacgatgtgcttccggggaaaggtgggggagtgtggggatgtgtctgtatcggtgattggtgcaagtagaggcttaataaggatgagaagttggtgtgttgtttgttgttgctattgctgttgtggttagcagttgtgcctgtgatggagtgaatgtctgcatacttgaatttgggatgttttgcagtagcaggtatttttctgattaaacgtgtgtatcgttttggttgagtcaagttgctgtttaaattctggaatcctgagatcgcaactgtattctgcatttgatgggtgctgttgtggcggcacattgatgtccctatgtgatgtctccgtgatgttggttcgggtgatctgtcttcgtgattggttgttagtattcgaatccggtgataacggctcttcaagttcggttctggtaaagcgagccagttttcactcgatcagtctgtgtttttatatgacttctcattttttatggcgatgttgatccgttgccgttgtcttccatgttatctgtgtcaggaaggaaagttgctttgatcactgcaatgcagtttcagcgtcaagttgccgaagggtgtacccgcattccagtggtgcgtgaagtccagtctgatttggatactccgctttcggtctatctaaaatttgccgatgctccatatacctatttgtttgagtcggtggaaggtggggagcattttgcgaggtattcgatcattgggttgccggcacgccgtgtctatacctttcatgggcataccctggtggtgagtgagttcggtaaggtgttggaaacgcgtcaagtcgccgatccgcttgccgaagttgagctgttgcgtgcgcagtatgtagtgccgcaattagaagggttgccaggttttacaggcggcttagtggggtggttcggctttgaatgtatccagtacatcgaacctcgcttcatggaaggtaaaaaacgtgatgaacttggtacgccagatattctgctgatgctttcggaagaattggcggtgttcgacagcctcaagggccgattatatttgatcgttcatgcggatcctgcgcaaccacacgcttacgctcgtgcagtggaacgtttggatgtgttgatctaccgtctgcggcaaggtggggtggattatccgcattcacatatttcggaagtgattaacgaggaagattttcactcttctttgacccgtgagcagtatcacgctgtggtgcgtcaggcgcaggagtatgtgcgttcgggtgatatttttcaggttgtaccaagtcagcgcctgtgtacgcagtttcatgcacgtccgattgatgtatatcgggcgttgcgcacgctgaatccgtcgccttatatgtatttcattgatattggtgctactcaggtggttggttcatcaccggagatattggcgcgattgcagggggatgtggtcacggtgcgtccgattgccggcacacgcccgcgaggtgcgactccggagcatgacaaacggttggaaatggagttgttagccgatccaaaagagcgtgctgaacacgtgatgctgattgatttgggtcgcaatgatatcggacgtgttgtcgaggcggggagtgtacaagtcaaggagtcgtttgtaatcgagcgttatagtcatgtcatgcatattgtcagtgaggtcaccggtatcttgaagccgggtttgaactacgttgatgtgttacgtgcaacgttccctgcgggtactgtgtccggcgcgccaaagatccgtgcattggagattatccgtgagttggaaccagtgtgtcgcaacgtatattccggtgcagtgggttacattggctggcatggagatgctgatactgcaatcgcgattcgtactgcggtgattcaaaacggttgcctgtacgtgcaggctggtggtggtgtggtgtatgactcggatccagatttggagtggcaggaaaccatgaacaaggcgcgtgcattatttagggctgtggcgcaggcggccagagggttgtgatagagagtgtcaaaagtgtatggggccacaatagcggcagtgactacggcccattcacggatgctgtgggtgcttcatttttccgttatgcgtcttcacacttgcctatgtgaaaacgattcgatttttctaattgcataatgagtgcattgctatgttgttgatgctggataactacgatagcttcacttataaccttgtgcagtacttgcaaactctaggtgctgaagtgatggtgattcgtaatgatgcgatgacagttgagcagattgcggcgctcaagcccgagcgcattgtcatatcgccgggtccttgcacgccgaatgaggctggagtgtctctaaaattgatcgagcaattgggttcttctactccgattctcggcatatgccttggtcaccagagtattggacaagcttatgggggcgatgttgtccgcgctaccaatatcatgcacggtaaaacatcggcgatttaccacaatgggaaaggggtttttgttggtttgcccaatggctacgatgcgacgcgttaccattcgttggttgttgataaaacgacattgccggatgtcttggaagtgactgcatggacagaggatcaggatgggacgattgaggaaatcatggggttgcgccaccgcaagtattttgtcgaaggcgtgcagtttcatcctgagtcgatcctcaccgagcatggtcatgcgctgctgaagaattttctggagcgtcctctctgagggaggtatcggctgtgttgcttgtccatcaattccgtcgtgttgcttggatccgagagaactgctaaatgtctatgactcctcaaaaagcgctacagtgcatcatcgaacaccgtgagatcttgcaggatgagatggtgcagttgatgcgccagatcatgaatgctgaggtttctggaatcatggtcgcagcgattcttgccggattacgtgtaaagaaggagaccgttggagagattgcgggtgcagcgacggtgatgcgcgagttctcccgtaaggtgaatgtgcaagatcgcactcatctggtcgacattgttggtactggtggtgacggttggcatactttcaacatttccacttgtgcgatgttcgtggcggctgctgccggcgctaaagtggctaagcatggtaatcgtagtgtttcctctaagtctggtagtgccgatgtacttgaggcattgggggcatctattgagttgcagcccttagaggtggcggaggtgattgggtgtattggtgttggtttcatgtttgcaccgattcaccacccagtgatgcaggttgtttcaccggtgcggcgcgagatgggggtgcgtacgatttttaatatcctcggtccgctgacgaatccggccgatgcgcccaatatcctgatgggtgtatttgatccggatctggtgggtattcaggcgcatgtgctgcacaagcttggtgctgagcgtgcattggttgtctgcggccgtgatggtatggatgaactctcacttggcaccactaccttggttggtgagctgcgtggcggtagggttcgcgagtatgaggtgtctccggaggactatggcatggcagtgtcgccaatttcgaacctacaggttgaaagccccgctgaatcacgggagatgttattggacgtgcttgctgggcaacctggtccagcactggatgttgtggcgcttaacgcgggtgctgcactgtatgtggctggtgtggcacaggatattggtcatggagttgcgttggcgcgtgaggtgcttttcgatgggcgtgccagggatatattggatcggtatgtggcgttcacacgtcgcccacgctatgtttgaatactgcctgattaaacacgctgtaaactgttctccgaatcgttttcagaggattctttcttgcgatgagcagacccgatgagcaacatcctcactaagattattgcgtggaaggtggaggagattgccgagcgtcttttgcatgtctcacaggctgaattggttgcgcgttgtgccgatttgccgacaccccgtggttttgctggtgcgttgcaggcgacgattgcgcatggtgacccagcagtgattgctgagattaagaaggccagtccttcaaaaggggtgcttcgcgaggattttcgtcctgcagagatcgctatctcatatgagcttggtggtgctagctgtctatcagtgctgacggatgtgcatttcttcaagggtcacgacgattatttgagtcaggcgcgtgatgcttgcactcttccggtgttgcgcaaggatttcacgatagacccgtatcaggtgtatgaggcacgtgtgcttggtgctgattgtattttgctgattgtcgctgcattggacgatgctcaattggttgatttgtccggcttggcattgcaattgggaatggatgtgctggttgaggttcacgatattgacgaacttgagcgtgcaatacagatttctgcgccattgattggtatcaacaaccgtaatctgagtaccttcaacgtgtcattggagacgacgttgacaatgaaaggattggtgccgcgtgatcgtttgctcgtaagcgagagcggtatccttacctctgccgatgtacaacggctgcgtgctgcgggtgtgaatgcgtttcttgttggtgaggcgtttatgcgtgcgaccgagcctggtgagtcactcagagagatgttcttcatcacgtgagtgcattatctccatcattgcgcgaggatgcgccattagttgtctttgatttcgatcatacgttgtacgatggcgattctggcagtgatttgttcgcttggctgatgctgcgcaatccgctgcgcttgcttttagcacttctagtgacgcctttactgggcccgttggtcgcaatgctggcgacgcggcgccgtagtctttcctgttacgtttggattgctacctttggcatgcgctatacgcatgagttcaataaggtcatcagggcttatgtgcgaggacatgcgtcgcggatccgcaagcgcttattaccgaaggcgttggaagtatttgcgtcccatcgcattgctggagattgtgtggtggtggccactggtgctccctctgaactggtacgcgaaatcctggctttggtggctgatcaggaggaggtggtgcctgtgattggcagttctatcgtgccgcgtttgggggcaatcattgttgttcgtcattgccaccatgaggaaaaaatgcggatgctccgtgaacagggctatggtgatgttgctgtggcgtattctgatagtactgcagatttaccgttacttatggcagcaaaggtacccgtggtggtgaatcccaagcccaagcgtgaaaaattgttccgtagggtgttgccgccgggtacatcaatcattcactggggatgtcctcgccgtggaggcgcttgcgattagagtgaggcaagtattcgttgtgttgagatgtctatgtggcagtaagcatatggagatcgcagcagcacaattggagcaggttacacactgttttttagtcactttgcccaggtaatacagcaatatcaatccgaccgtttgcagataagatgggattgctgagactgcatgtgtatgcggcgatggtggcaaaacggtatccaattgtttctcgtcgtgataattgcggggatgtacaagcctgaccatcattttaattgacgggacgctcatttgtggtgcgcgtatttaggtggattcttagaaacagcttttcccaagcgttctgtggactttggcatcgcgttgtttttgttttaggcaaacaattccacctaatattttctgtcagaaaagcccagtgcattagtgggacatgagaagcatctcgattgtctgtcaaaacgttgattgctgacgagcaagagtgatgacaccaatactttggtgtgaacgcttggatctatggttgccgaagggaaggtgacgccgtcctcaaattgcaggttgaaatgtctccgtcatctcgttgaggctatctatcctgtagttgctattgatatcgcgtatgacaggcttagcggagtgtcaacgtaggcatacattgagaatttgttgttctgttttcgtcacgggttggttgtttgcaagcgttgccaaccagtgctttgctgtttttcttctatcgcaagtgcgggattgcaatcaggcatggtgggataaggttttatgtatccggtgtctctttgtccctggttttccctgatcgcaatacgtagtggacatcctgttttttccatgaagtgggggccattttctggaaatatttttacataaaattcatttattaatagtttttcctattattcataataaagtgtgatgtatggtgataaaatattttgatattcatcataaaataacagggttatggagagtttagaaacaaccgatctacgtattgctgtcacttgtcagcgctttcctgcttactcgcgtaatcaagccgtgcttttaggtttggtcaaacatatttacaagcggattcatacggattgcaatcgattcttacgtcggtttggtctcagttatcctgaatacgatattctgatgatcatatacggtactgaggatttttctctgacaccaaccgaggtcgccgagtcttctggtgaaaagccagcgaacgtgactcgtttaacaaacagtctttgcgagaaagggttgattcgacgttctattcatcacaatgatcgtcgtaaggtcactctgactttagagccagctgctttggaattgctcgacaaggcattgccggaggcttgtgtgcagatggaagcgcaggtttgtaatctatctgaacaggagaatcaggaattagaacatctgttgaagaagatgctttcgatgattgataactctactgataagcaataattgcaatccctgtaacccagtagttttcgtattcgctactcttactgattggcaattgccaattctaaagattgttgaagaggcatatatactggcttgctgtatgaataagtcggtgcccttgggacgttgcctcgtaattgagtatggaagtagggcgaatgcgtttggtcttttgtcgcaactcaagatcagctcactttggtcgcgtggatctgaaagccgccaagttgaatcaggcattctttcgtacctgcttgtaaagtaaaaatggatgacaagggaaagttgcaggccgtcaaattgctgttgtgctgttgcttggcacttccttcatgcagagccaatcaagtggatattaatggttctagcgacgctggtgagcgtacgtagagcaggtcgaagttttctatcgcattacgcagtgtatcaacagaaacgcctatgggaggccataagcgttttggtcgcgtggactagtggtggagaagaggaggatcgaactcccgacctcgtcattgcgaacgacgcgctctaccagctgagctacttccccgtcctgcaaggtagccataataatactatggtgattgagcgaaacaagagttcctgtcgagttttcatgataacgatacttcttgatatatcttcagtatcactctgaaaaagaagtagcacatgttttgagaaacgtctgttgtttctattaaatgtgtgtatttgtagagatctccgatagtgtcaggaaagtcaggcgcataccctactatcggctcacatcaatcaatgtgttttggtatttgaaatcttcaacgggcagttttttattggccctttagggattttcaatcttttcaagtcgttatttttattagacaccacgggaagatggttttactgctgtgagatagtgggtgcgtatggagtgataaccataaattcgattaaatgctctattaccgcaaaagtgaccatgtaatttttatcttctgtttagtgtttttatgaggtagtaggcctctctttttttgaagattataggacgatttttattgatgatatgacttgattcaatcgtatgaataatgatattcgccatgagtaatttttatttctccgatggttgtagacaggatatgtttgcgcgccaggtatgggtatccaaagagactttattgatttttgattgctgtgttggtactgatgtagagatgattcgttatagataatctctaattccgaaatatcccttctttaaaaaaatggatttgaggaagcagaaggatctctgagtgtgtatggcgatatgggtgaaggaaataaaaaaattaaaacgttttacgtgcgttgctgatgatcaaggcgtatgtgtcttgctgtggcttttgtaacatgtgacttcatcgggtggatggagcttgttacaagttctaaaccatagattgtctgtgtaatggatttggaagattttgatgatccattctcgaaaaataaatagtgaagtgcagtttgtgtgggagtgagtggtgctctcatctctgataaaaattgagtcacgataccgacatcgacatagcgctatgcctcatagtgtacggccatgacattatgttttggagagtgcacaaatgtgggtggcgttgttgagagagtgtcctcggctgtggtgttgggtatgacgtccatactgtattgccgcgagagatcatgatgaagtgtatagagatactgaactcagccgattttctgactatcgtgctgaccatcttctcaatagtgggatggttcttgctcggtgttcgatcattacccaggtaacggaattggctgccatgctggaggtgttgtttcaggcgttgtgcgatggcattgcgtgttgtcttgatggaggttggagtaacgttagggtgagggggtgtatatgagcatacaaatcggtcatctcacttttgagcaggcgcgtgcgcaacttgcgccgtgggcgcagcgcgctcctgcgattactgtgaacgaatacgcgcagcgcattgagcaagcgcgtgtattgatgcgtatccaaggggtcgatgcattgttggtcggtgctggcgcgtcgctgcgctattttactggggtgccttggcatgcgagtgaacgtctggtggcgctattgatcttgttgtccggtgatccgctgttgatttgcccagtgttcgaggaagggtcgcttgatgcagtgttgttattaccagttggcaagcgtttgtgggaggaacacgaggatccgtatgcgttggtggcgcaggtaatgcgtgaacatggtgcgcgtacgcttgcgttggattctggtgcgacgtttgcggtacatacggggttatgccgtcatgtagatgcgagggcgattaccgatgcaactgcgattgtcgatggttgccggttgtgcaagtcgccagcggaattagcgttgatacagcaagcatgtgacatgacattgcaggtgcagcgtttggctgcggggattgcgcatgagggcatcggtacggatgcgatggtgcggttcattgatgaggcgcatcgtgcgctaggtgccgacaacggttcgactttttgcattgtgcagttcggccaggcgacggcgtttccgcatggtattccgggggtgcagcacttggttgagggccagttagtattgatcgatacaggttgtacggtgcagggctatcactcggatatcacacgtacctggatttacggtaagcctagcgatcatcagcggcgcatctgggatttggagcaggctgcgcaggcggcggcatttgcagcggtgcggccgggtgtggcttgcgaggtggtggatagggcggcacgtcaggttcttgaactcggtggtctgggacctgattaccgtctcccgggcttgccacaccgtacgggccatgggtgtggtcttgcgattcacgaggcgccgtatttggtgcgtggtaaccacacggtactttgtcccgggatgtgcgccagtgatgagccgatgatcgtggtcccggggcactttggtgtacgtcttgaggatcatttttacgtcacggaggatggcgcacactggtttacattgtcctcaccagcgatcgacaggccgtttatctgatggtcaagagactttgcttcatccaatttctctggtttgtgtgaagtggcgaagcgacagggattgtgatctagatgtggtcactttgcctttgcttctttatctgcttgggggagagggtgtcttgagggtgtagatgagagcttccacgcaaagagccgtacattaaattttggggattagtcgcatgccgtcgatctgcactcttgctgtctcgctgttgtctgtgctgctgctgtcggcgtgcagtagttctagttcacttagcaggagcgatacccgtgatcgccgcgtgattccgtccgagcaggcggcccgtgccttcgatcagttgctcaatgagcagtggcagtacgagcttgtgcatagtcctgagtttgccagcatcatcggggataagcggtacaacgatcgttggagtgactattcgtctgctgcagttgctgcagaccgtcaggcgactttggggtttttggcaaagtttcagaaggtcaatgcggctgcgctggatgggcagcgccaactgagtttgatattgatgcagcgccagttgcaggaccatctggaggcaatccggctgaggttgcacgagatgctgttagagcctgttggcggtgttcatttggaacttgccagtgatgtcgatatgtttccattcgaggacatcaaggattatcaagattacatcaagcgcttgcagcgggtgcctgcgctgattgatcaggtgattgaggtttcgcgccagggtgcgcaggacggtctgatgcagccgcgttatctattggagacgctcccggcacagattcgcaagattgctgaggcggcgggtgccgacagtccattcgcttcgccattgaagacgcttgatcaagtggtcacggatgcagcgcagcgtgcgcaattgcgtgcggcgctgatcactgcgatagatcagcaggtacgtccggcgtatgaaatgctggctgcgtttgtgcagaacgagtatgcggcgaagggccgtgagcacgaggggctatggtcgttgccggatggggaggcacgctatcgttttgcaattcacacgcagaccaccactgaccattctccggaggacattcatcgcattggtctgagtgaggttgcacggattgagggtgagatgactgcaatcgcgatctcaatcggttacaaggacttggctagcttccgcaaggcggtggcgagtgataaggcgcattttgcggaggatgatgagcagatcctcggcttgtatcgtggttacatcgctggcatgcaggtggcgttgcctaagctgtttgaggatggtgatctgccgaagactccgctggaggtgcgggcaatgccagcgttccgccgcgaggcgcccggtgccgaatatttgcagggcactccgcaagggagcaagccggctattgtgatggtcaacaccaacgatgcgactgagcgtacgttggttaatgtcgagactacggcctaccatgagggggtgccagggcatcacttgcaaatctcgttggcgcagaggttgccactgccgccgtttcggcagcatgcgggttacaacgcgtatgttgaaggatgggcgttgtacgcggagcgcttgggtaaggaggccggcttcttcaaagacccttacagtgattatgggcgcttagcgggggagttgctgcgtgctaatcgcttggtactggatacgggggtgcactataagcgctggacgcggcagcagatgattgatttttcccatgcgcacccatccgatgatgagccgagtattcaggcggagacggatcgttacattgtctggccggggcaggcgctgggctacaagctgggtgagatgcagatcctaaggttgcgtgctaaggctgagaaggcgctcggtgcccggttcgatctccgagcatttcatgatgcggtgttgggtggtggtgcgatgcctttggatgtgttggcgcagcggattgatgcgtggattgctcaagtgcagggtgtgcagcaggcgaagcgatgatgcggtgtattcgtctgttctggatcgctttgctagtgatggctgtgactgtgagtgttgctcaggcgacaccggcgccatttgatatggctgcgcgtttcaaggcgctgtatacgcgcgagtggcgttggcgtcaggcagagtttccgggtgttgtggagggcagtagccagccgcagtgtgtcgatcacttgccaaaggtggatttggcgacgcaaaacaaacgcaccgcttactggcagcaggtgcttgaggagttaaaaacaatcaatccggtgcggctttcatcggaagatcagattaattatcaggtctatcggcagcaaattgaggtgcttcttgacggtcagcgcttccggagttgggagatgccgttcaacagcgatacggcgttctggagtgatttgagtttcagtgcgcgtggcagtttccgcactcctgaggactatcgttgttatctgggcgtgttggctgatatgccgcgttatttcaacgagcagattgttaacctgcgtcaggggcttgcgcgtggttttgctcaacccagggtcacgctggaggggcgagatcaggtgattgctgaggtcgctggtgctgccggtgaggacaatctgttctacatcccattcaagcagatgcccacgatgatgtctgctggagagcaagcccggctgcgtgctcaggcgttgcacttgattgtggatcaggtggtgccagcctataggcagttgctggcatttatgcgggaggagtatttgtctaaggcacgtacggtgttggccgctgaatcgttgccggagggtattgcgtactaccgtgcaaagatttttgagtacaccacgctggatcttgatccggaagccatctatcagattggggtggctgaggttgcgaagttgcgtcagcagatggatcaggcgatcgttgatagcggtttcaaaacatcgccggatcagcagatcttcccggcgtttttgcattacttgcgtaccgatccgcagttttatccgaagactcctgaggcgttgctcaaggaagcggcttggattgcgaaacgtgtggatgccaaaatcggtctctatattggtcgcttgccacgccgccgttttgctattgagccggtgccggcagatgtggcgccttactacacaagtggccgtggtggtccggggatctattttgtcaatacttacgatctgccgtcgcgtccgttgtataacttgacggcgttaacgctgcacgagtcttcgccaggccatgcgttgcagatgccattggcagaggaggcgcaggaggtgccggagttccgccgttacacgtttatttccgcttacggggaagggtgggccgtgtactctgagtacttggggcaggagatgggattgtacgatacgccgtatgatcgctttggttatctgagttatcaggtatggcgtgcttgtcgcttagtcattgatacgggcatccatcacaagcggtggacgcgcgtccaggcgcaagcattcttacgtgacaacactgcactgagtgagcgtgagataacgaccgaggttgatcgttacatcagttggccggggcaggcgttgtcgtattacctgggtgagttgaagattttggagttgcgtcataaggctgaagttgcgctggggacgaaattcgatatccgtcatttccatgatgccgtgttggggctgggttcggtaccgctacaggtattggaggcaaggattgatcgtttcattgccgaggatggcagatctccgtatccagagactactgctgtagtgcattagggctgatctgcggtcaagtcgattgtgtgtggatgttggtgatggtgctttttcaagcagatttagatcgtgtttctggtggtgatatggtgttgatgtaggcggcgcggcagggccagggtgttggtgtttggtggtgaggttttgatgtgcagggatgggtgtgttgtgtgtggcatctccgatgtgtcgtcagcggtgttggtttggtgttgcttgaaggttttgtgcttgatgttagttagttaagttgtagtgggtgtgtaaaacgcattcggtgtcgctgagggtgtggtggggcgcgatggtgttttttaaatctgtcgtgtcggtgtggtcatctcagtcgtttgttgtaccaggatcttgattgagtgatggctgtgatgattaagggtgggcgtactgtttgtaatccgggacaatggaaggccgttatcgtgtgcgtgccgtatgtctcgattgcagtttcagcttcaggcgaccgatggtgctgcccgtcgtggtcaattgagtttcccatgcggtactgtgcagacgccggccttcatgccggttggcacgtatggtgctgtgaagggggtgttgccaggccagctttgtgatttgggtgctgaaatcatccttggtaatacgttccacttgtttttgcgcccaggtctggaggtgattgctgatcatggcggtctgcatggcttcatgcgctggaatgggccgatcttgacggattctggtggctttcaagtattttcgttggcgcaccggcgcaagatcagtgagcaaggtgtgacgtttgccgcaccgacagatggtgctcaggtgtttcttggacctgaggaaagcatgaaaatccagaaggtgctgaattcggatatcgtgatgattttcgacgaatgcacgccttatccggccactgaagatgtggcccgtgactcaatggagttgagtctgcggtgggcgcagcgttcacgtgatgcccatgatgccttggacaatgacgcggctctgtttgggattattcaaggcggtgtgcatcctgatctgcgcggtcggtcgttggacggtttgcaggcgatcggctttgatggctacgggattggtggtttggccgtcggtgagtcggaatctgagcgcaatgtgattcttgagtacctgcatccacgtgtgccggcggaccgaccgcgctatctaatgggggtgggtcgaccggaggatctggttgagagtgtggcccgtggcgtggatatgttcgattgtgtgatgcccacccgtcatgcacgtaatgggcagtattttactggattcggtacggttaagatccgtaatgcttgttatgcgagggatgtagatcccattgagccgggctgtggttgtccggcttgtgttggcggctatactcgtgcttacctccgccatttggaccgttgtaacgagatgttggcatcaatgcttggtaccttacataacctttggtactacgaaacattgatggctaatatgcgtgcggcgattacagcggggactttttttgcattccggcgttctttctatctggcgcgtggtcttgatcttccgcctctgcctgaggtggctggttgcgccgggtgagtcgaatgagatgtcggctctcatggcataattgtcggcttattaccgcttcggcggacgcataaagttgggcatgtctccgtgtcctgtccatgaaatgatgattagagatggaaataactatgaacttgtttgatttcttcattcccgttgctcaggcgcagagcgcggctccggccggtgcttcaccaggtggcggtttgcaaatgtttttcttgccggtcattctgattgcggtcatgtacttttctattattcgtccgcagatgaaacgtcagaaagagtacaagtccatgatggatcatcttgggtgcggcgatgaagtgatcactgctggaggcattgccggtgtggtatcagtgattggggatgagtttgttactgtagagattgcggaaaatgtgcgcgtgcgcgtacaaaagagcgccattgctaaggcgttgcccaaaggctcgttgccgtcggcgaaatgatgtctatctcctttatgattttcctagggtgcgatgctgtagcaggcgtcgcccgagacttgcgcaatgcttgaattaccccgttggaaatatgttcttatttttgttgtgtttgtgttgagcacgctgtacgcgttaccaaacgtgtatcaaaaagatccttcggtgcagattaccgccaatcgaggcggccatatcgacgatgcattccgccagcaggtgatgactgatctgcaagcatccggcattgtgcctaaggccgtgaccaaggagggggagagcctgatggtgcgcttgatgtcgttggagatgcagacccgtgccagcgatgtgttgcgggctaaggtcggtgagaattacaccgttgcattgaatctcgcttccactgtgccagattggttggctaagttgggtgggcgaccgatggtgttaggtttggatctggttggcggtgtgcatttcgcgcttcaggtggatcagaaggccgctctgaataaatgtatggatgcttttgttgaggaggtacgttcgacgttgggtagcaagcgtattggcttccgcatggtcgaacgccgtccggacaacacgattcgagtgacgtttgatgatgatgctcatctcaatgaagcacgtatggtgttgtttaaggagcaagtggggctgaattattcggtatccggaaataccttgattgctcgtgtttctgagaatgagttgcgtcagattgccagtggtgcagttgagcaaaatctgacgactctgcgtaatcgcatcaatgaattaggcgtggccgaaccaattatccaacgccagggggatgatcgtattgtggttgagttgcctggtgttcaggacactgctgaggctaaacgtctgatcggtgcgactgccacgctggagtttcgcggtgtggttgacggggatgcctatgaggcagtccgtactgggaatgttcctcctgaggccaaggtgtattacatacgcggcaccaaccagccagttttattgaataagcgtgtgattgtttctggtgatgagatggtgaatgcgacggtcggtgtggatgagaacggcatgccagcggtcaatgtcaccctcagtaatgttgctggccagcgcatgttggactacacgcagcgcaatctttacaagctgatgtctgtggtctacatcgagcgtattccgacggtgagcatggttgatggtaaagaagtgcgtggcgtgcggttaaaggaagaggcattgtccccaacccggattgctggggtatttggcaaaaacttccgtaccaccgggttggagaagactgaggctgaaaatctgtctaaattgttgcgcgctggttcgttggctgcaccgatggatttcgttgaggaatatgtgatcggtcctagtctgggtgcagagaatgtagagcgtggtgtgactgcagtggtgttttctttcctattcaccctggtgtttttcaccatctattaccgcatgtttggtgtgattacttcattggcattgctgtttaatttgttgattgtggtagcggtgatgtcgctgtttggtgcaaccatgactttgccgggttttgccgggttggcgctgtcggtcgggctttcggtggatgctaacgtgttgatcaacgagcgtatccgtgaggagttgcgtcacgggatgcctccgaggtcggcgattgtggccggttacgacaaggcgggtagcacgattcttgatgccaatttgaccggactgattgttggtgttgccttgtatgctttcggaaccggtcctttgaagggctttgcgttgactatgatcatcgggattttcgcctcaatgttcactgcgattacggtatcgcgttcgctctctgcgctgatttacggtacgcgcaagaatctcaagtctttggctatctgaccgggaagagaacaacattatgaaactgttcccgctgcatctcattccgaacgacaccaagatcgactttatgcgctggcgtcaactgacgttgatgttgatgtcgatactttttgcaatatcagtcttggttgtcgtttttaagggatttaactatgcgctggaatttaccggcggcacgctagtgcgtactcagttcgcaaagcctgtggatgccgatcaggtgcgtcagcggctggaggttggtggtttagggaatgcacaggtacagagcgtcggggggggtaacgagttgctgattcgcctgcagccgtatgccgaacataataatgatgatgtggccaaaaacgctgccgaagcggtgcgcaaggtgattacgttgccgggtaatccggcaaccgtacagcctggggaattcgttggtccacaggtgggcaaagatctcgcgatgaatggtgtatacgcaacgatctttatgctgttgggttttttgatttatatcgggtttcggtttgagtggaagtttgcggtcgcagccagtctaacggcgttcttcgatctgattttgacgatcgcttatatgtcgctgcttggtcgggagttcgatttgactgttctggctggcttgttgtctgtgatgggttttgcgatcaatgacatcattgtggtgtttgaccgtgtgcgcgagaacttccgtagcctgcgtgtggagccgttagaggtgttgaatcgttcgatcaatcagacgctatctcgtacggtgattacggcggtcatgttctttctgtcggcgtttgcgttgtacttgtacggcggtcgctcgatggaggggttggctgaaacccatatggctggtgcggtgattgtcgtcgtgtcttcagtggtgatggcagtgccattgttaaccattggccctttaaaggtcagtaagcaagatttgctgccgaaggcgaaagacctggagtcactggagcgccgtccttaatgatcttctttacatgaatttatttgtggaggtgagctgtggaagggcagtttagcggtcactgtcatgggaagggtagtgcacaccttgtggctactctacctagggttgttggagtcgttgcaagggtatggggatatcactgaggttgcatgtgtgtttcaagccaaacattggcgctccctagggggctcgaacccctgttttagccttgagagggccatgtcctaaccgctagacgaagggagcgttggtcagttcgataaaggcccgttaatataaaagcgccttcgcctgaaggcaactcatctttaggggcagtatagttcatgctttgcgtcgtaccgcgtggacaccatacgatttcacgtaaggacattagtccgaatgcgttgcgggtgttgtaccgcctgcgtgaggcaggtttcggtgcgtatttggttggcggtgcggttcgtgatttgttggtaggcggtcatcccaaagatttcgacttggctaccgatgcaacacctgagcagatcaagcagttgttccggagttgtcgtttaatcggtcgccgctttcgtttggcgcatgtggttttcgggcgcgagattattgaggtcgctaccttccgtgccaatagtgatgatggaagtggcgatcgtgagctggagaatggccgtttagtgtgtgacaacgtctacggtacgattgaggacgatgcgacccgtcgcgatttcacctgcaacgcgctttactacactatcgaagatttttcagtacgtgactacgttggtggttttgaggatgttcagtcgcggctgatgagattgattggcgatccggtgcgacgttatcaggaagatccagtgcggatgctgcgtgcggtgcgtttagcagtgaagctcggtttcgagattgaggctggtaccgctgagccaatttcgcgtatggctggattgttggctgacgtggcgccagcccgtttgtttgaggaagtgctcaagctatttctctcaggacatgctgtggccagtttcgaggccttagaggattttggtctgattgatgtgttgtttcccgagagcgctaaggcattgcgtgctaaccgtagtggtgcattgcggcgggtattgatcgaagggctgcacagtactgataagcgggtgattaaagaggaaccagtgtcgccggcattcttgttcgcattgttgttatggcctggtttttgccatgcgttggtcacgttgcaattgcagggtgtgcagccagaggaggcacaacgtcgtgcagctgatcgggtgacgttgcatcatcttgagcgtgtcgctttgccgcgccgcttttctttgccgatgcaagagatttggttgttgcaaaaccgttttatttcacgccagcctaagcgtgtcttacggcttctggaacatccgcgctttcgtgctgccttcgatttcctggtagtgcgtttggcggcttctgctgagcatgctgcagacgtggagttttggcgtgtggcacaacagcagccttctgaagactctctggcgtcagccattgatgctgtgcggtttgaatcggaggaagtgggtgtgtcgcgtcagcggtaatgccaaggtggtcaagtagagtgaccagtggcaatgtggtggcttatgttgggttgggcgccaatctcggcccggctgagatgacgttgcgagccgcaattgctgcgctggatcagttgccgttgacccgtctacgcattgcttccagtttgtatcgcacccctccctggggacgtcaggatcaggcggagtttgttaatgcggttgcagcgttggaaacagggttagcgcctttggccttgttggatgcattgttggaggtggaatgtttccatgggagagtgcgtcttcccggcgaccgttgggggccgcgtacacttgatctggatttgctgctttatggggagcaggttttggatctgccgcgactgagggtgcctcatcctcatctacatgtgcgcgcttttgtagtggtgcctttggccgaaattgctgcggagttggtgcttccccgtcatgggatggtatgtgagctactggagcatatagataccttgggcttggtaccaatcaggtagataatgttcactggttagattttcatgaatttatgagcatatataccaatagcaaaccttggacggtgcctgctttggcggaggccaagcgaaacggttctaaaatcgtgatgttgactgcttatgatgctgggtttgctcgtattcttgacgcaaacggcgtagacctagtccttgttggcgattcgttgggaatggtggtacagggccatgactcgactcttccggtgagtgtgcatgacatggtgtaccacactgcgtgtgtggctcggggggtacgtcaggcaatgcttgtggttgatttgccatttcaggctgatgcgtcgccggagcgtgcgctagaggctgccactccattactgcgggtgggggcacagatgatcaaaatcgaaggtgctgggcacaagcttgaggtgattagttacttggttgagcgtgagattccggtgtgttcgcacttggggctgactccgcaatcggtactgcgttttggaggttataaggtgcaaggacgtggtgaggaggctggggggcgtttgcgtgccgaggcacgtgcggcggtggaggctggtgctactctcttgctattggagtgtgtgccgtcgcagttggcagcgcagatcactaccgatgtatcggtgccgacgattggtatcggtgccggtgctggttgtgatggccaagtgctggtgctgcatgatctccttggcctagacagtggtcaccctcgaccgaaattcgttaaagattttctcgctcatgggggatcggttgctggcgcggttcgcgcttatgcgaatgcggttcgagatggttcgtttccagatgtcgagcatacttacacatcgtgattgagaccgttactgatctgtccaggttgcgggggattgttgctgactggaggcgtcagggcttgcgggtcgctctggtgcctaccatgggtaatttgcatgctggccatttttcattggttatgttggctcgtcattatgctgatcgtgtcgtgtccagtgtgtttgtcaatccgacgcagtttggtccccacgaagattttcggcgttatccgcgaacacccgaggcagacatgcgcggtttggaacatgtgggttgcgatgtcttgtggttgcctagtgtggagacgatgtacccgttgggtactgagcggacggtacgtctgtttgttccgtgtgtgagtgatgtgctggaggggacgttccgtcctgggcactttgagggtgtttgtacagtggtggcacggctgttcaatcaggtgctgccggatgttgctgtgttcggaaagaaggactatcagcaattggtggtgatccggcagatggtggttgatttagcgtttcccattgagattcttggtggctgtatcgtgcgtgagtccgatggattggcgatgagttcgcgtaatcagtatctatcaatgcaggaacgaccgcaggctgcggagattcatcgtacgttgatagcaatgcgcgatgctgtcatgtccggtggtgtacacgcagatgtcgaagctgaagcggttcggcgtttggaagcggctgggttccaggttgattatgcggttattcgcttgtccgatctgggtgagccgattgacggcactgttatcagtccgggtatcgcacttgttgctgcacgtttaggcaacactcgcctgatcgataatcttgagttctgattattcgttccgaatcaattgttaccaccggtaggtgtctgtcattggctacaatcactttccttactttgctgcgtttcccatgcaactgtccttgcttaaagctaagatccaccgtgctaccgtcagccattctgaactcaactatgaagggtctattgcaatagacggactactgttggaggctgccggtctctatgagtttgagaaagtccacatctggaatgtgacgaatggtgcccgtttcactacttatgcaatacgtgccgagcatggcagtggcatcatttcagtgaatgggggtgctgcgcgttacgtgcaggttggagatttggtgatcgttgctgcgtttgcacaaatgagtgaggacgaggcagcagttttcagcccgaatttggtatacgtggacgctgccaatgcgatgactcataccaaccacagtattcctacacaggtcgcgtgacacatgcacaatgggttcgatgctttgcagcttcatgccaatcgcttgcggggggtgacaattccagatctgttggcggctgagctaaaaagaccagagcaatatgccagacaagttggtccgttgtatttcaactttgctcggcagaagtatgactgtgtggcgttggaagcactgtttgcattggcgcgaaaccataatgtggctggtgcgttccagcgcatgttttgtggggagcaggtgaatgtgaccgaggggcgtgccgtgctgcatactgcgctgcgcggtgatcttagtggtacttcggtggcggttgctgcttacacggcggcggctaaagtgcgcgagcgaatgtatgcgttgattgccgggctggatgccagtgaggtgaccgatattattagtgttggtattgggggctcggatcttgggccacgtttagtggttgatgcgttgcgtccgatttcccaaggacgtttccgagtccattttgtctctaatgttgatggcgctgccatgcggcgtactctggatatgttggatccatcacgtacggcaggcattctcatctccaagacctttggtacgcaggagacgttgctcaacggtcgtattttgtacgattggttaggcggcagcgagcgcttatatgcggtcagtgctaatccggaacgggccgctcatgcgttcgacattgtacccacgcaggttttgccaatctgggattgggtgggtggacgctattcgttatggtcagcagttggtttcccgattgcgttggcgattggttcccagcgttttgaggagttgctggctggtgcggctgagtttgatgcgtatgccctgagggtgccgttagaagaaaatgttgcggtgttgcatgggttaactgcggtgtggaaccgtaacttccttggttgcgccacgtatgcggtgatggcttatgaccagcgcttggcattgctccctgcctacttgcagcaactggtgatggaaagtttgggtaagcgggtcaagtgcgacggaacgccagtggatagggatactgttccagtttggtggggtggcgtggggactgatgtgcagcatagttttttccaggcgctgcatcaggggacaaatatcgtacctgctgactttatcggtacgatccgcaatgatgatccgtacactgagaatcattttgctttgaatgccaatttgctggctcagattgaagtgttagcgaacggccagcttagtgatgatccgcatcgtgtttatccaggagggaatccgagtacgttgattttgcttgatgcattgactccacaggcattggggggattgattgcgatgtatgagcatagtgtgtatgtgcagtcagtgatttggggcattaatgcgtttgatcagtttggtgtggagctgggaaagcatttagccgttcaattactacctgcattaaagggggagagtgttgaagtggtggatccggtaacccgtgcggtgttggtgcgtttgcgtggttgagtgttgtagcgacgttatgattaggaatgaagtctaagttaagcatcagtttgccactctggttgcttttattgatgcacttcgtgagtacgtgcaatgcgtcattctgcaatccgaattccttggtccgcccgcaatttttcgatgcatcacgagcttatttatatgatagcggaaagcgcgccgattccacgcgtctttggaaggtggtgttccattcgctacagaatatgccggtgacgtccggatacgctttcgtgctgggtgctattcaatgatatagcctggttattgatctacacgctctgtatttgctggagtgttttgaagcttcgatccagcaggcatgccaagattcgcccatatgattgatgtgtctgtagatcgcgtatcaattaccgaagtgcttgggatatggtatcgattacctttgagttcgtctgaatgacgttatatagctgatttttctttggctaagtttcccaagcatgtaagcagtttgtaaggagttttttcagataacgcccgtctttagtgtctaaccgcagtcattgctccaagtagtacgatgaatggctccaacaagatttccgtggcgcgactctccaacagcgttcgaccactggaacatctgctgtacatgtgggtttcccgatagtggcgaaatgatgtcttgtgggcgtgagacaagttcaatgcattacacatttatcacaacaatgtcgtgtgcatgcaacaacatgctatccgatggattagaaatagttgatcgcaagtgttcggaattctttcaagtggtttaatctcgaggttctttgttagtagtggatgcttcgggcgatggttgatttttgtcgtagaagcagtttagggcatgtggttatacataagaacagaaaagcatggttaagcctctgtttaagcgtatcaagtgtttttcagatttcccatgacggatgtcgaaagtatctagtgtagactttgtcatgaaagttataggtagtgaggggaatgaatttgtgttctccaaaatctttaatcatttatcgttgtcctcttagggcttaagtgcatgactccagaattgcattttttgttgtaaatcatgcttttgggggtgagcggtatgcttggtatgacttacgcagtaattgcttgtaattttccgtttgattcttcataattaacattctgctgcggggtggagcagtctggcagctcgtcgggctcataacccgaaggtcgcaggttcaaatcctgcccccgctaccatttgtagcagcagtgttgttttgggtactttctcgctgaggttgttttcttcgcgattcatgtttctatgtcttttcttgtatgtcacttacgttctctaagtggcttgtttgttggggttgtagtatggctatatatggtagatagtttgttggtttttatctcaaccataagtttctggcattcgtttgtatcattgtcagctttaagcgcttgttgatgtgatccttgcattccttcgggtatttctttgtatttgcatacacttaagggaatcggtgctcgcgctgttctgctttggctttcttacttttggtcgggtctgtgtttcgttaataaataaagccactcttccttaaataaagttcacggaatgaacttgattagtttagtgtcatccattgctcagctcaagagttgccctgcctcctttagggtgctgtacgtgtttatctttaggatgctctgtttagggatggagtttgttggttgatatctgaattttgggtgccgagcttcttctttgttaatgcaagcttgctgttatcttttaaaatgtctatcatcgaaacagtaatcagtttttaaagattctcggtaagccttgattatgtttttatcaatgtttccggtggagcaaggagctaaaagctggcgttagatgtttagaacgtttagtgatggtttccgttggatgaggatgctttttgtcgtcttcatcgtatctttatttgcatgtcggatttttgtgcaatggggcccgagtggccctttgctatttttgtatcatcagtgatgtgtgcatcatttttcagcagggcgtaattcaattggattaaggcaatctgtgagtgacaaaggcattgaaattgtgaatctgttggcgccaaaggtcgagacgcttgggttcgagctgcttggtgctgagtatcttcttgtgccaagtggcgctattttgcgactatacattgataccccgtttgctatgcagccagagtgcatggtaagtattgatgattgtgagcgcgtgagccgtgaggtatcggcgtatttagacgttgaagaacctatcagtggcaattacacgttggaagtgtcctccccaggtttggatcgccgactgttcacattggagcaatttgcccgccactataaccaatttgttaaggttggattgaagttgccacagcatggatctcgtcgcttgcagggaaagattgtgcgtgttgagcaagtggatggttttgttgtcttgcttgtcaatggtgttgagctggctgtggattttaacaacattgataaggctcggattgtccctgactggagcgcgctaggcttggcaccgctagaaaaaagtaagcctgacacgaaaaaaacgagtcaaggcaacaaaaaaccatccaacgagtcggcggcacggcaagccgtgcgtggagtgattagatgagcaaggaacttttattggtagttgatgtggtcgccaacgaaaagggtgttccacgccagatcatctttgatgccattgaggttgcgttggcgtcggcggcgaagaagcgttatcaagatcgggacattctaacgcgtgtcactatcgatcaaaagagcggcaactatgagacttaccgccgttgggaggttgtcgctgatgatgtggtgatggaatcgccggagcgccagattcgtctcatggatgcgcttgatgaagctgatggtgtagaggttggtgattacattgaagagcagattgagaatccggattttggtcgtatctctgcacaggccgctaaacaagtgattgtgcaacgtgtgcgtgaggctgaacgtcagcaggttgttgatgcgtggaaaaatcgtgttggcgagttagtaactggcgtagtcaaacgtgttgaacgcggtaatatttatgtcgatttaggtgggggtactgaggcttttatccctaaggacaagggtatcccgcgagatgtaatacgtcctggagatcgtgtgcgtggttacttggctgaggtgcgttctgagtcacgtggcccgcagcttttcattagtcgctctgctccagaatttatgatcgaattgtttaaattggaagtcccggaagttggtcagggtttggtcgagatcaaagggtgtgcccgtgatcctggcgacagggcaaaaattgctgtgattgcgcatgataatcgcactgatccgatcggtgcttgcataggtatgcgtggttcgcgtgtgcaggctgtctccaacgaactcaacggtgaacgtgtagatattgtattgtggaacgaaaacccggctaactttgttatcaatgcgatggctcccgctgaggtacagtcgatcattgttgatgaggagaagcactcgatggatttggctgttgctgaggatcgtttggcccaggcgattggtaaaggcggccagaatgtacgtttggccagtcgcttgacgggttggcaattgaatgtgatgaccgccgagcaggttgctgctaagtcggaagccgagcaggttgccgcccgtcgactgtttatggagcgcttggaagtggatgaggagattgcatccattctggttatggagggattcaacactatagaggaaatcgcttatgttcctgtcggtgagctcctggcagtggaaggttttgacgaggatattgttgaggagctccgcgctcgggcacgtgatgcgttactgaatgcagccttggccgaagaggagggtttggaacattctggtccagcgccggatttgttggagctcaatggtatggatgaaatcactgcgcacgcgcttgctgctcatggagtgcgtactagcgaggacctttcagatttggctgctgacgagattgtcgagtttgatattcaaggcatgaccgtccagcgtgcagctgtattgatacttgctgctcgtgccgaggaaattgctcgtttggagcgtggcgaatgagtcgacaatgaacaacgccttgacctgttcagggcttaaaatttgcgcttcccttgcgttgggcgagggggcgtccaactgatcataggaaccgaatgtcgcagcaaaccactattcgtaagcttgccgagctggtcaatacgccggttgagaaactgctagagcagttggccggggctggtatgaagttcagtggtcccgaccaggtcgtgactagtactgaaaagatgaagctgctcgggttcttacgccgcacacatggtaagtctgatgtgtcggttggagctgtccgtgaggcaccgaaaaagatcacgcttaatcggcgtcggctacaagaagtgactgttaacgctggccgcaacaagactacggtaaacgtggaagtgcgccaaaaacgcacttatgtgaagacgcccgagagcgaatatcatacgccgacgaaaccacccatagagctgggtgatgccgagcgtgttgaaatattgcgtaaacttgaagaatcacgccagcgcaatcttgctgagcagcagcgtttagctgaagttgaccgtcaacgtgttgaggagcaggagcgaaagcgccttgaagaagaacaggccgagcttgagcgccagaagactgaaagtcccgtagttgaggaggttcctgtccagtcagattccaattccgtcaaaccggtgtctaaaccaatctctgaagaccgcacgcgtgcgttgccgcgagcagtgcggccagcaccggctgcgcgcccttcggtatcgcgttcggatgaccgtaatagcaatagtggggtgcggcataagccccgtggttcgcacgtgattgtttcggacgaggatgattctgcgcgccgttttgcgggtcaaatgcacctgacggctgctgaacgtgctcgccgtggtagcaacacacgaggcaaaggaggtggttctcaccgtggcgctactcatcgaggtaacgagaacagtattcgttctagtggtgctcatggtttcgagcgtcctactgcggcagtggtgcgtgaagtcgctgtcggagacaccatcaccgtagctgatttggctcagaagctcgcgctgaaaagtggtgatatggtgaaggcgttgtttaagatgggcgtgatggtgacaatcacgcagaccattgatcatgacactgcagtactggtaagcgaggaactgggtcataaggtgactcgtgccagcagcagtgattttgaggatgctttacttgcccatactgaagaagtgcatggtgagccggttccgcgtccacctgtggtgacgatcatggggcatgttgaccacggtaaaacttcgttgcttgattacattcgtcgcaccaaaattgcagtgggggaggctggtggcatcacccagcacatcggtgcttaccatgtggagaccccgcgtggagtgatcagctttttggatacgcccggccacgccgccttcacctcaatgcgcgcgcgcggcgccaaaatcacggatattgtggtgctcgtggttgctgccgatgatggtgtgatgccacagaccaaggaggcagtacaacatgctagggcggctggtgtgccgcttattgtagctgtgagcaaaattgacaagtctactgctgacccacagcgtgtaaaaaacgagttgttaaccgagagcgtcgtagccgaggaatttggtggagatacgcagtttgtcgagttgtccgctaaaactggtgttggcgttgatgcgttgttggacgcaatttcgattcaagccgaggtgttggagctaaaggctgtgattgaaggtcgtgcgaccggtactgtgatcgagtcttcgctagacaaaggacgtggtccggtagcaacggtattggtgcagcagggacgtctgaaaaagggagattacttggtatgcggcactcattatggtcgtgtgcgtgctctgttcgatgaagttggtcaccaaccacttgctgcatctccatccattcctgtacaggtgctaggattgtctggcgtgcctgatgctggagacgatttcgtagttgttgatgatgaacgtcttgctaaagatgtagcgcagcagcgcgaggctaagcgccgtgagtctcgtctagttacttctgctggcaatcgcatggaagacatcttggctcagatgggtaaaggcgagaatcagcaagtgcttaacttgttgattaaagctgacgttcaaggttcgctagaagcgcttaaacaggcactggtcgcactgtccaacgacgatattagaattaatgtaattcatgttggtgttggaggtattactgaatcggacgccaactctgccgtgacctctaaggctactgtgattggcttcaatgtccgtgccgatgcctctgctcgtaagatcattgaggcgaatggcgtagatttgcgttatttctctatcatttacgatgttattgatcaggtgaagcaggtcgcttctggtttgcttggggttgagattcgtgaggagatcattggtgttgccgaggtacgggatgtgttccgtagctccaagttcggcgctgttgccggttgcatgatcattgagggtgtcgtcaagcgctccaaaccaatccgtgtcctccgtgataacactgtggtgttcgagggtgaattggagtcattgcgtcgctttaaagagaatgttgacgaggtgcgtaacagtactgagtgtggcattggagtgaaggcttacaatgatgtcagggttggtgatcatatagaatgtttcgaacgtattgaggtcgcgcgtaccttgtaagcggtacccgccctgcgcagctgttatttgtaactgttgtccctttataggtctaattcccgtcaacgtgccattgttcgtttcttttcaaaatcaaatttttcctcgtgcctaagaaatcatttcagcgtgctgaacgtatttctgtccagatccaccgcgatttaggtgctttggtgcaggccgctgtgcgtgatcatgggctgccttctatgagtgtgtctgatgttgaggtgactcgcgacatggcgcacgctaaggtgttcgtgactgctcttcaagcagagcgatcattcgaggcagtggcagggttgaaagcgttggcacgcgaattgcgtatgcaattagcgcacaccatgagactgcgtttcgtgcctgaattgcacttccattacgatgattctttggatcgtggtgaacgcattaatacattgttgcgtgacctgataccaccggctgatgcggaaaaagatgagtgtggttaaaccttgtattggtgaaatgaccaatgcaaggtgttgatcctttgcccatagtctgctgtatttcttcgttcttcctgtgtttgatgcttcttgcttatgtctcgcattgcctattgtcgtttggatggtattttgctgcttgataagccagctggcataagttctaacagtgcgttacagatcgcgcgtcggttattgcgagctaaaaagggggggcatactggtagcttggatccactcgctactggattgttgccgctgtgttttggagaagccaccaaaatcgctggtttgctattgggttctactaaggcatacgacgctgacgtgctactcggcaccacgacgacgactgatgatgctgaaggggctgtgttacttacgcgccctgtgccgacgttggatgccgaaatggttgatgccgtgatacctcaattgattggtcgaattaggcaacgtgccccaatctattctgctctcaaacaggggggtgaacctttatatgctaaagctcggcgtggtgaagtggtcaatgccccggtacgtgaggttgaggtgcatgcgatcgaattgcttgttttggctacgccgcgattacaattacgtgtgacttgcggttcgggtacatatatccgtagcctagttcgcgatttgggcgaaatcttgggctgcggcgcacatatcactgcattgcgccgtcgttgggtcgctccatttcagataccgaagatgttgacattggatgcattggagcaggcattgagtgcagggagagatcctgattctctgttattgccattggttgaaggattagctggtttcccagcgctggagcttgatgcccagcgtctagcttgcttcaggctagggcagcgcttgcgcgatcatagtttccagactgggcgggttgcggtgttcagtcgagatggtatccctgcggggctgggagaggtggatagtgaaggcttgttggtgccgcagcgtcttttcaatctttgaatctggattttttaaaaactatcagcttgtgccgaactttttgggccgatacaatttcactgccttacatttaggtatcttgcgctataagcgcgtcctttcagcaaacggcgagttaggtggttaacccagcatctctgccaactccgcgtctatttagagaacccactatgtcgatcgatactcagagcatcatcgagaacaataagcgcagtgcccatgatacggggtccccagaagtgcaggttgcactgttgacggctcgtattgagttactgaccaagcacttcaaaattcataagaaagaccatcatagtcgccgtggtcttctacagatggttaatcgacgtcgtagtttgcttgattaccttaataaaaaggacaacgaacgttataagctgttgatagaaaaactcggcttgcgccgctgagattttttcgccttcgccgtggatcagagacgtgccgtggttgtgtttggattcgcactctacttcaagggattgcaaatcctcataaccgcgttatttgcaaacactgagcatagttgatccgtttataaagcatcatcctaaggaaactctcgtggcaaaaatcaccaaaaccttccagtatggcaagcataccgtgactctggaaaccggcgaagtcgcccgtcaggcgaatggagctgttatcgtcaagatggatgacactgtgcttctggtcactgttgttgctgcaaaaactgcgcgagaggggcaggattttttcccattgacggttgattatcaggagaagttctatgccggtgggcggatcccgggtagcttctttaagcgtgaaggccgtgcgaccgaaaaagaaacgttgatttctcgattgattgaccgtccgatccgtccgttgtttcctgaagattacaagaacgaagttcagattatcgcgatggttatgtcactcgatccggaaatcgacggtgatattcccgcaatgattggtgcttcagctgcattatcactggctggtattccgtttaagggaccgattggtgctgctaagattggttacaatgatggtcaatatatcctcaatcccactgtcagtgaactgaaaaaatctcagttggagcttgttgtcgctggtactgccaatgccgtgctgatggttgagtctgaggctgcattgctttccgaagaagtgatgttaggggcggtcattttcggtcatcgcgaaatgcaaaaagtgattcaggtgattgattcactgaccgcagaagctggtacgcaaccgtctgattgggtgcccccggccaagaatgatgctttggtcattgcgttgaaggaagtaattggtggccgcttgtccgacgctttccatatcagagacaagttgcagcgtcgcgacgcgatcgctgctgttaaagatgatgtgattcagcagttggctggccgtcttgaagttgagggctggaacttggcggaattgttaaaggaattcggtgaactggaataccgtactatgcgtgatgcattgttggacactaaagtccgcattgatggacgctctctggaagctgtacgcccgatcaccgtaaaggttggggttctgccgcgtgttcatggttccgggttatttacacgtggagagactcaagcgattgtagtcactactttgggtacagcacgcgatggccaagtaattgatgcagtcactggtgaatataaggaaaattttttattccattacaacttcccgccatattcagtgggcgaatgtggccgttttggagtaccgaagcgccgtgagatcggtcacggccgtcttgctaggcgcggggtattggctgtgatgccgagtttggatgaattcccatacacgatccgtgttgtctcggagatcaccgaatcgaatggttcttcatctatggcttcggtgtgcggttcctcgctggcgctcatggatgctggtgtgccggtgaaagcaccagtggctggcattgcgatgggcttagtcaaggaaggggagcgctttgttgtgttgagcgacattctcggggacgaagatcaccttggcgatatggatttcaaggttgctggtacctccgaaggagtgtccgcattacagatggacattaagattgaaggcatcacagaagagattatgaggcaggctttacagcaggctaaggttggtcgtttacatatccttggcgagatggacaaggcactggctgcaccacgtgccgagttgtccgactacgctcctcgcctgctgacgattaagattcatcctgacaaaatccgtgatgtcattggtaaaggtggttcgaccatccaggcgatcactaaggatactggaacacagatcgatatccaggacgatggtacgatcatcatcgcttcagtcaacaatgctgcagcccgggaggctaagtgtcgtatcgagcaaattacctcggatgttgagccgggccgtatttatgagggcaaggttgctaagattatggactttggcgcttttgtgactattttgcctggcaaagatggtttagtgcacgtttcccagatatccagcgagcgtgtggagcgtgttggcgacaagctgaaggaaggcgatgtggttcgtgtgaaggtcttagaagttgataagcaaggtcggatccgtctttcgatcaaagccgtcgaggaagaggttgccagcatatgatctggcttcctctacctgctctcgtgtgcatagtgcagaaaatgaatttacataaggcttatgcatgtatcgcagcgcattgctcgttgccatcatctgtcttacaacaccgattgataacctcttctggatagagagcaggtgatgctttaaacccgacaggctattgccaagccaccttgttgcgcgtgatcgaaacggttgcgcgccctgcgcacttcgtcatggtgcgtgcttgcccatttaagtaaatgcatcacaggtaccaacagactttcgcctagaggtgcgagtgcatactctactcttggtggtttggttggatagactgtgcggccaatcattccattacgctcaagatgccgcagagtttgcgtgagcatccgtttggagatgtcaggtacggcacgctggatagcgctgaaacgtgttggtccgggcactagagttaataaaatcaggagtgaccacttatcgcctatatgatccagtacatcgcgtactgggcatttggtcgcgtcgaacgggagattttcccatccaggtggaggggctgaggaagcgatagaagcaaacatgttcatgatgggggcctcaaaaattaccttgactgtaaaaaatttcttcttgcgaaaaaaatcatagtctcgacaataaacatgatattttgaaaatcctcttagaactttagcatgacccgaactatttcccgtatccttgtgactggtgccagcggccaacttggcgctttagtgatagaagaattgctaaaaaagatacctgcatctcatttgatcgccgcggcacgtgatccaaaggcattagttgcgtttagtagatgtggtgtcgaaacgcgtctattggattacaccgatcagaccagcatagatgctgcccttcagggggtcgaacgcctgctgctggtgtcctctaatgccattgatcaacgtttggcgcaacaccgcaacgtgattgaagctgcggcacgtgctggtgttggtttatttgcttacaccagcttgttacatgccgataactcgtcactgttgctggccaaggatcacgtgcaaaccgaagcgttattgaaagcatcggaaataccttacgtcctattgcgtaatggttggtataccgagaactacactgactctataggagccgcgttggttcatggggccgtccttggtagtgctggtacaggccgcattgctgcggctacacgtgctgattatgcggctgctgctgcggctatattggtttctgatgtcgatcaagctggacgtacctatgaattggctggtgacgaggcatttaccatgccagagtatgctgctgagattacacaacagtctgggaaaccggtgatttaccgcgatttacccgaagctgagtacgctgcaatcttgatgcaagtaggattgccggagagctttgctgcaattctggcacagtctgatattggtgcctcccagggcacactcttcgatgacagtcaccaacttagtactctcatcggacggccgacgactccgctacgtgaagtggttgccaaagcactttctgcagtccgctgagctacttctgtgtgtcctttgatttcagtgactcagtgacccatgggtatgcttgatcactggatgttcaaaatcagtgtcgctggtgaagttccttgtcgacttcatcagcacccataattactgctgatgtttcccttaaacatatcattgcagtaataaatagagcactgtcatcaaccgacttaagggatatcaatagtcttaattgtgatggtgttaggtgagccgttttctcctgtattgctggcattgtttgattcagtctgcggccaaatatcactgcctgcttagccatcttggttgctatttagagcgtgagagtcagctctgatatagcactgcattgcatgaagggatcgcttgattgccacgttgaatatcgaaaaggcatggcatgaatagagcaaatacaccacttgacttgtgattgcgcaccgtcactttgttccccttgaatcctgagtgcacgaaaaactgtgcgtactgttgattagtctggtagcgatagccaagtggtttgatcgctgaccagcgcctatgcagcagcgtgagatttctcaaagccatagctggaaaaatgtttccctgatctttttgtattgtcccatcgttatatttaccttgtgttcttaagtgagaaacatcaccgaacatatccctacatacctatattcaaacgccacagatcgctatccgttgagtacaccgtgtgattgcattagcgtgaatgaaacgcataacgccatgatgactacatcgctgcaacgtgctaactgcttcgtgtcgtcactgacacaatagttacttccttcttatcctgctaagtacagatggttccatcttcacagcatagttcactacttatttggtggacctgcgaaatgcctacagcgttattgatgtcttggatgcccagcagcggtattcccaatatgcggtacatcgtcatgtctttctcgtccagcgataggctgcctgctttgttctttcacaccaatcagctttcatcggtcttggatgcatgcttgtcccctaatgcatcatcatcgcctataagcacacgcgtgcagcccttatcccgttttaggtaaattgatttcctcaagtctggattgttgtttgggccttgtccaaagtggacttgcggaagtggccaatgctcaaaatcagccttcttcttgttctttcgagatagaaaatacgctttgccaactcagtttggttatcgcacacaaactttcagatgttcatatcagacagacacgtgaccagcaacagctgccagtcacgcgcgttatgctgactgacacgttcaccccgctgtttccacaacgtttctttttccaaagcgtaaaccgaagagcatgtcatacagacttgggatcaaccccaaagtcaccagcgtgcctagtgccaaaccaccgatcatagtgatcgccatcccagtccatagaggaccaccgaacaacatcagtggcaccaaaccaacaatgcaggtcagcttagtcatcacaatgggtcgcagacgtttgaccgctgcagacaccacggcttcccgacgcggcaagccatcggcgagttcgacttcaatgcgttccagcaacaatacggcgttattgacaatgattccggctaacgcgagcagcccgaaggtggcgataaagccaaaaggatgcgcggtgatcagtagtgctgtcgctgcaccgatcagtacaaatggaatgctggctacgacgatgaataatttacggaacgaattgaattgcatgataaacagcagcaggattgcgactaatgcatgcggcatgaactgcaacaatgcttgattggcttgtgccgcatcttcgatctcgccaccaagctcaatacgataaccaggtggcagcttgagtgaggcaaccttgggtgccagtgcctgcacaatttcgcctgtggtcattcccgcgttatgcccgatgatcgtgattgtgcggttgagattgcggcgcatcagcgtagagggttcagtatcgttttctatttttgcgattgctgataacggcagcggcgtgccccctgcttgtgagtacaccagcgtgtcgcctggattaccctgtgtggcgcgctccgttgcattgccacgcagtacaatcggtgcggcaaccccatcatcgcggatcagtgaagcgttcacaccgctgtagcgcatttgtagagcctgagcaatctcttcactgctgatcccggcacggcgtgccttcaactgatccacatgcacgatataacgtggtatacgtgcctgccaatcgttataaatgtcatacgtgcctggcaacgcgcttagagcctcgctgatttgcttagcagattgacgcagcacggcttcatccggtccgacgatgcggtagatcacaacgcccgcatcgtttgctcccaacgaaaatcgtttgggttcagcatgcacatatgggaacgcattgtgcatgtgctggcgggtgcgtgcgatcactgcatcaatgtcagtgcctggatgcacactgatggtgaagtaggcaacattgggtgccggcagcggtggattcagaccaagcacaatacgcgggccaccgtcggcgacgtaaccgatactgtccacgacctctggattaatctgtttgtcagcgaaccaatggcttatttgttggacggtgtcgagcgtttgccgtgaatcgctgccgggttgcagcgtgatggacatttggaattgcaaacgatcggatttaggcaggaagctatacggaatcagggtgatgacgatgacggccacggcgagcaatgccagcatgctaccgatgaagagcaccttgtgctccagcacgcggctgatgattgcccggtaactacgataaaacgccgaatcataaagattatgtccttgatcctcggtgggcgcacgatgcgccttggcgaagtacaagcacagcaatggaatgatggtgatgctaagcaaccaggaactgagcaaagtgaccgctaacacgatgaccagcggacgcaagtactcatttgttgcagtttcaccgaagaagaaaggagaaaaagccagcacaatcactagcgatgatgtcaacaatgggatagacagcgtgcgtcctgcttcgatgcaggcatggcgtcgattctcgccaatggcaagacggcgctcaatgtcctcagcgatgacaatggcgttatccaccaacagacccagggccataatgattgcaacaatcgagacggtatgcagttcgatattgattgcgcgcatgatgatcagcgcactgagaacagtcagcggcacgatggttccaacaatcagaccagtgcgccaccccaagaacaacatcaccacagccatcacgatgagcaccgtttctcccatgacatgatgcatcttgctcatttcacggttgaccacatccgcctggaaggtcaccacgtgctgttggaaccctaccggcagcagttgactggtttcttcaagtgcagcacgtagtgtgttgccgaactctgaaatgttgcgtccgctggtcatcgataccgccagcaccacggctggttgtccttgatacaccgttgccgtttggggtggatctgcaggcatcacctgtacttgcgcgatctgacttaatggcacttcgcgtgcactggcagaaccaggtaccgacaccaaaaagcggcgcaactcatcgacactgcccacttcaccgctggtagcgacagtcagcgccatcccggacgcggagacgagtcctccaggtgtaacgacattttgtgcttgcaattgctggatcactgcccccggagttaacccggcctcaaccagtttggcgcggtcaaacgcaacgtaaacctgatcctcctgtagaccgtgcagcgtgatgcgttccacaccaggcaccgtatacaactgttcgcgcattcggcgtaatggctcacgcatttcgctcatgctgaagccaggtgccgtgattgcgatggaagcgactgccacgcggccaaagtcgtcattgagaaacggacccagcgtgccggtgggtaaccctgtaccggcctcagcgactttggctcggacgcgcagccacaacgtctctaaatttttgacattgtcataggcggtcaactggatgagcacactccctggccgtacggtgctgacaattttcttaataccgacaatctcgcgtagccgttcctcgataggttttgctaataacgtttcgacttgctcactaggcatccctggatacgccactgatatcagcgtatcgcgtaccgtgaccgaaggttcctcttgcgaggggaagttgagaaaggtggcgataccggcgatcagtagcaacactgcggtgaatagagtcagccggttggcactcattgctacgtgcgtaatcttcatcggctgtctccagtgctcaaacgcgagctggaacggaacggcagcactttttgaccgtcgctgaggaacgctgcgccggcaaccacaacctgttctccgggcttgagtccggagcagatctgcatccgctcaccttcgatcattccgagtgtgacatcgcggcgtaacaccaccccggttttaggttggtagacaaacacgattccactgttgccgttcaagcccggtatcactgcgggcagcggcaccgacagcgccggcgttgcggtggcagacagtgccaataacagcgtgtcgccactgtgcagcggagtcgttgtttctgtcacatcgaagattgcttgcaggctggcaccgctttccaagcgtggagacacactgcgcaggcgcagtgagatgcttgcttgcggtgtatcggtgcgatttccctggatcaccttgtttggactcagtgcctgggcaatctcggctggcagggtggctactgcttgtagacgcccccgtccttcgatctgcaacaccgtttgacctggtgcagtatcagcctgtggttgcaagaggcgtgcgacgacactcccatcgaatggtgcacgcagttcgctttggcgcagtgcgcgtttggccaatgcgtgattggactcggctacgtgcagatcggcttgcgcagcgtctaatgcgacttgtgcgctggtgagcgcagcctgagaaaccatcgcttctttaaacatcgcttgctgctgattcagctgagtctggcgttcgtgcaactgtgcggtggcagcacgtaaagtggcttctgcctgttgcagttttagccgtactggctcccggtccaggcgggccagcacttgttcatggcgcactttgttgccaacgtcgacgctgattgcggcaatccgcccgccgttttcgaaggctagatctgcgcgttgttcctgacgcacgctggctacaaactgggtcttggcgagagtttcagctccagcagtctcgagtttgaccgtgcgcaccagcgttgtttgcggtgatctgtcgctgccgcaactgcttaaagtgatgaccccaagcgtgatgcacatcgacagagacaggatattattcttcactaagtatctccggtcggtgatgccgacccattcatttaagggatgtagtgagtcaagcagcgatgacaacgttgctgtggtcgcactgggattcggctgctggcgatgttgtcgatactaaacgttccggtaaattccaaagtgctgggagcgtgtgtcgtgaatggttgtgcgtgtgacattcggagtgatcatacatacggatcagcaatcgattgacgtttcatgcactgaaagtgtgtgttctttttgggagttcctccaaaaggtaaacgcggcaattattgcggttgctgaatgaggtgatcatgtttaaatcgctttcgttacgttccgagttgaatgactgaaacttggctttggtgtagcagcacgttgtcatgagcaatggtgcgcatcacgcatgaagccttgctgtcattaatcatcatggcgttccttgttgtatcgctatggaacaccaggaggccaatgtctgtatgttgccggtgttgttaatatgcgtgagtccggcgagcaacggaccttgcgctgcggtttgcttggggtttcgtagaaaaagtgtcacaaatattagattgtgtggagtcaggatgcacgcatctgggtcaggtgtgaaatgagcaaacagcatgttgtgctgaatcggcagcgttggtggtgcatgaatgctggttatcagtccaagcaggatcttgtgcatccgctgtatcagagcgcgccttaaaaatctggttcgatgttcctgatattgctgttgcatagtttttgttcatggtgcggatttgtcggcgtgccaatggcgattgtttggcgatggttctcaccctcaacagagcacatgtttgctgaggaagcagacagacacaatgacgatcacgaccagtaggatctacgggtgtaacgaccgaatatctatgtgtgctgatcgcgttcatcgtcccagcactgagacagaacaggatcaggaccacgaccagcatgcctccaaggtcgcagagatctgctccttatggcttgaatccgtcgcaagtggctttgattctgttcagtgtgatgcggcttgcagcgatgttacgcatgccaacaccaatcactggaaggcactgctgcagtgggttgggagtgataccgaccacttgcatctgtgcttgatgcattatttatgcgggatttgatgtgcaatgaacgcagagggcggcgttacatctaatgtggtcatgttgtgtgatgcatagcaatgtattgcccaaacttcagtgtgtccagtgcagtagtgcggtttttgaacatggcagccgttgcggctgactttgttggtggatgctggcgtagctgggatgggggggcggccgtttggatttgcggtttgatgttgacttcagttgttgttggccgtgatttttgttgaagccattgttgctgaatccgttgtgctgccgtcggttgcgggtacattgaagaagacatctggcatgggcattgttcatgtgtttcagcgcggcacttacttcattgatggttagcaccatcacatgtcgtttcccgtctagtgcccctgcaatgatcgaccttttgcgagatgccccacagtatggccagttgcgctcaggcgattcggaataaatgtgacggttatttagggttgcgtgagatgacacgggcacagtgaaaagatgatttcagggacaataggcagatgctgatctcttccaaagtgcgcacggcgcaattgcaaatccatgtctgcgtcttgctctggggatttactgcgatctttggcaagttgatcactttggaagcgttgccgctggtgtggtggcggatgacgattgttgttgtttcattggtgttgctgccgcgtgtgtggcgtggtctacgtgcgctgcatccgcgtgtcatgcttgcttatgctggtatcggcgcattggtggcgttgcactggttggctttttatagcgcggtcaaattggccaatgcctcggtggcagcaacctgcatcgcattggcaccggtgtttactgcagtggtggagccttgtgtggtggggcggccgttccgggcacgtgagctgctgttggggctgatggtgctgccaggcgtggcgcttgtggtgggtggggtccccgatggcatgcgtattggtatttttattggtgtggtgtcggcgttattagccgcgttattcggttcgctcaacaaacgtatggtggtgcacgccgatccgttgactgtcactgctttggagctgggggctggcatcttgacgctgacaggattgatgctgctgttgtcgctggtgttttcgacgttgcatgagatgccgtggcagatacccagcgcgcatgacgttttcctgttgctcatattgtcatttgcgtgcaccctgctgccgtttgcgctgtctctggttgcactgcgttatctcagtgcttattcgcttcagttggtgactaatttggagccggtctactcgattgcactggcgattgtgttgctcggtgagcagcgcgagctgacaggacttttttatttaggcgtggcagttgttcttggcgtggtcttattacatccgatgttggagcggcgtggtcgggcgtcgtctccgcagtagcggcatcgctcagctcatcaacagtaaagagaggatgcagtgatgtgggtgtgtgtcattgggcaccgccatcagatgatgcgtgttttttctgtttcacagtagtcacgtgcttttcaggatgtgagttagccatcaagaagcaagcgtgccttggttgaatataaagcgctggtgtgccgtgcataccacacatggtgtttcagaatttggtatgacacatcattgggttgtgtcgcattgtgtaagggttggcgctaatgcttcagcacggcgcccacggaagggatgtcggtgggcgcgcgcggctgtggattaatgcgatcgcaggggattcaaccgctgtatggtggttttggtttggttgatttgttgtgatgcggtttcggcgggaatttgccagcgccacccggttttgacttaaattcccgtgcagttgcggttgtttcggttgtgtcgatccgacgcatttgtagttgctgtcctgatacccagaccttttttaggtgttgcaggatttcgtgtggcatctctgcggggagatctagaaccgagtgatcgtcacggatgtcgatccggccaatgtagcggctctctaatccagcttcgttggcgatggcaccgacgatattagctggcttcacaccgtgtatgcggccgacttcgatgcggtaagactccataccgaattccggggtattgcgtgctggtgcgttacgttgggggcgcttggggtgttcagtgtggtttgggcgctctgtctgcttgaaggatgaggagcgtttgacatgctccgatggtggctcgctgcgttcgcgttgggcgcgcgttgggacactcagcaggaaggggctatccccctgaaggagtcgtgccagggcagcagcgatctcaatggcagggacattgtgctcgctctcgaaacgttgaagcagtttgcggtagaagtcgatttcagcgccgaccaccaaagcattgctgatgcgtccgaaaaatttggcgacgcgcgtgtcgttgactgcatccacactgggcagttgcatggcttcgatcggttggtgagtggcacgttcaatctggcgcagcatgcctttttcgcgtggagtcacaaagaggattgcttcgccgctgcgaccggcacgcccagtgcgtccgatacggtggacgtagctctcaacgtcgtaagggatgtcgtagttcagtacgtggctgatacgttctacgtccaaaccacgtgcggcgacgtcggtggcaacgaggatatccagcttgccatctttgagttggtgaatggtgcgttcgcgttgcgcttgttgcatatcgccattgatcgctgcggcggtcaggccacgtgcctgcaacttctcggccaattcttcggtggcagctttggtgcgcacgaagataatcattgcgtcgaaggtttccacctcaagaatgcgtgtgagtgcatcaagcttgtggaggccgctgacccaccagtaacgctggcggatgttggccgcggtcgtggttttggtggcgatggtgacttcaatcggatcttgtagatatgtttgtgcgatacggcggatctgtggtggcatggttgccgagaacagagcgacctggcgtgaagcgggcaacttccgtagcacttcttcaacgtcctcaatgaaacccatacgcagcatttcgtcggcttcgtcgaggaccagcgtttttaattccgataggtccagggtgccgcgctctaggtgatcaatcacccggcccggagtaccgacgatcacatgaacaccgcgtttcagtgcggccagttgttggccataggattggccgccgtacacgggtaggacacggaagccagagatcgaggcagcatagcgctggaatgcttcggcaacttggatagccagttcgcgggtgggtgccagtacgagcacttgcggcttgacctggttcagaacggtgcgtgtgagcaacggtagcgcgaatgcggcagtcttcccagtgccggtctgggcttggcccagcacatcgcgcccagcgagcaaggctgggatggtcgccgcctggatgggcgacggagtttcataaccgatttttgtgacggcttgcatcacagcatcggagaggccgagatctgcaaacagcagcggcgtagaggatggatttgacatgagaactccggagagcaccgctgcaactgagcggcctcagggggtggtattgtgcgctttatatgggttgttgtcgaaacgttcacaaggggttggttcaggtgtgaggcatcgcttgtcatgcttgaaagcgcggtgctctttccctatttctgttttttggcttttgtctccggtgttgctgtgttgactctctttgcgttgaatgaaacggcgatatccagtgagctttggtcgatgcaccagcacatgaaaggttatttcacagtgttgttggtgatggaggagagcgcagattttgggtgctctctggaagcttatttgttgagagccatgtccagttctgggatgagttgaaacaggtcgccgactaagccgatgtcggcgatctcgaagattggcgcgtcggcgtcttgattgatggcgacaatggtccctgcatctttgatcccggtcaggtgctggatggcaccgctaatgccgatggcgatgtacaaatccggggcgatgatttttccggtttggccgatttgcagttcgttcggtacgtaaccggcgtccacggcagcacgtgaagcaccgactgccgcaccgagtatgtcagcgagtgtatagatcaatttgaagttttctggggaaccaaggccacggccaccagccaccacacgtttggcgttttgtaggtctggacggtcgcagatgtgcacatccaggctgagaaagcgggtgtggtttggtaggtgtgctgagaccgttactgcttctatggtggcgttgccgcctttcgcggcttctggccatgatgcagttcgtatggtggcaacgacgatctgatcagtaggtgctttcaccgtgatgattgcgttaccagcgtagatgggacgggtgaaggtgtaggcgtcttggaggcccattaggtccgaaatttggttgacgttgagtagcgccgccacgacgggcatgaggtctttgccaaacgttgtcgagggtccgaacacgtgggtgtagttgttggtttggacgagtgcggcgatttgtggggctagtatttgtgcaatcgggtgcttgttggcagggttggcaatggtgagtacgcgtgtgacacctgcaatgtgtcgggcttgcgcggcgacgctgtccgggatggcagctagtacggcgatgtcgatgacttcgggtgatagtgcaagcgctgcactgacagttttagccgttgccgcgttgagttgaccatccaagtgttcggcgatgataagcagcttggtcatgatagggctccttggttcttgaggagagtcaccagttcggtgacgtttttcaccatcacgccttggttgcgttttttggggggtgcgtaatgtgtggtttgcaggctatcgtgtgctgttacgccaaggtcggcgaaggcgatggtttccagtggtttgctcttggccttcatgatgtccggcagtttgatgaagcgtggggcgtttaggcgcaggtcggcggtaatcacggccggtagatcaatgtgcagtgtttccaaaccagcgtcgacttcgcgggtgacggtggctttgccatcagcgatggtcacttttgatgcaaaggtggcctgtgggcggccccatagtgtggccaacatttggccggtttggttggcgtcgtcgtcaatggcctgttttcccaggatgaccagtgctggctgttctttctcaaccagtttgagtagagcgcgtgccgcagtgagtggttgtactgtggtgtgggtgacgatgtggatagcacggttggcccccatcgccagtccgttgcgaaggtgtgcggtcacgtcgtttggggcgagtgtggcgatgacgacttcgctggcgatgcctgcatcacgcaggcgtagcgcttcttcgagagcaatttcgtcgaaaggattggcagatactttaacgccttctgtcatcacgccggatccatcgggtttcacttggatgcggacgttgtagtcaaccacgcgcttataggcgacgaggattttcattgtgtggaggtcctggaactgatgcgtgaaagttaggttgcggtggtgggttatacggaagtgtgccaattctacggggcatatggtggttctgtgcctgtgtcagttgattggagtggctgttgttggatgtcaaccgtggtgggatgtgaccggggtatcctatggtgctagacggtccctgtcaggtgcaggggtgtggtgcttgatggagaatgggattggcaacgtggctcgtgactggtggtgccggtttcatcggcggtaattttgtattgcaggcgattagcctcgggcatcgcgtgattaatcttgatgccctgacgtatgcgggtcatttggagacgctcgctttgcttgatgggtgcgcggagcatctttttgttcgtggtgatattggcgaccgtgcgttggtgagctgtttgctggatacgcatcgcccggatgcagtgctgaattttgctgctgagagtcacgttgatcgttcgattgatgctcccgctgcgttcattcagaccaatgtggttggcacgttgctgttgttggaggcggtgtgtgggtactggaaggcgttgccggaggcggcgcgtgctgcgttccgttttctgcatgtatccaccgatgaggtttacggcagtttgggggagacgggggcatttacagagaggacggcgtatgcacctaattcgccttattcggcgtcaaaggccgcgtctgatcatttggtccgtgcgtttcaccatacgtacggattgccggtgctgaccacgcattgttcaaataactatggcccatatcattttccggagaagttgattccgctggtcatcaccaaggcgttggccggtgagccgttacctgtgtatggcgatgggcggcacgtgcgtgattggctgtttgtcggcgatcactgtaccgcgctgtgtgctgtattggctggaggacgggtgggtgaaacgtacaatatcggggggcaggccgagcgtgagaatcttgaagtggtccgcatgatttgccgtttgcttgacgagcgccgcccgcgtgccgatgggcagagttatcaaagccagattgttcatgttgcagatcgtccggggcatgatcgccgctatgcgatcgacacgtccaagttggtgagtgagttaggctgggcgccggtgtatcgctttgagcagggacttgcgctgactgtggattggtatttgcagcatcaggattgggtgcgtgcggtgctccaagggcgtgaccgcgttgagggcctactgattgcggtgtaaggccgaggttcggtaaagagtgcgtatctatcgcagactttcatatcaggaaatcgttccatgacacagcgcaagggcatcattttggcgggtggggccgggacacggttgtatccgatcactcaagggatcggtaagcagttactgccggtgtatgacaagccgatgatttattacccgctcagtgtgttgatgttggcagggattcgccaggtgctggtgatcacgatgttgcatgagcagccgttgttccagcgtctattgggtgatggtacgcagtgggggatggagatttgctacgcggtacaggccagtcccgatggtgtggcgcagtcttatttgattggccgtgcatttgtcgatgacaagccaagttgtctgattttgggagacaacattttctatggtcatggtctgacggacacgctgtgtcatgccgacgcgcgcaccgtgggtgcgacggtgtttggttattgggtcagtgatccggagcgctatggggtggcggagttcgatggggacggacgagtcatcaatattgaggaaaagccagcacagccacgttctaactatgcggtgacggggttgtatttctacgatgggcgtgcgcctgcatttgctgcggaattgacgccttcggcgcgtggtgagttggagattactgatcttaatcgccgttatttggcagaaggtgcgttgcacctggaggcgcttggacgcggttatgcttggttggatacagggacccatcagtcgttgcaggatgcgtccaactttattggaacgatccagacgaggcagggtttacaggtatgttgtcctgaggaggtcgcgttctggaaaggatggattgatgcgacgcatttagagcgcttggcggcaccgttggcaaagaatgcttacgggcagtatttgttgaatttagcgcagcggggacggtctctgtgaaggtgattgatacggcgctgccaggttgtctggtgattgagccgagggtgtttgatgatgcgcgcggcgaatttttcgaggcatggaatgcggagtgtttccagcgccaggggatgtcatcgcgctttgtgcagagcaacgtgtccatatcaatgtatggtgttttgcgtggtttgcattatcagtggccgcgtccgcaggggaagttggtcggtgtgttggagggtgaggtttacgatgttgctgttgatatccgccgtggctcgccgcattacgggcgttgggtagcggtgttgctcagtgccaaaaacaagcgccagttatggattccggaagggtttgcgcacgggtttgtggtgttgtctgagcgtgcggtattcaactatctgtgtacggatgtgtacgtgaaggaagccgatgcgggtatccgctggaatgatgcgttgattggcgtggattggccgattgctgtgccgctgctttctgctaaggatcagaaggcgccgtttatggaggaagtccctattgatcgtttgccgatatatgtgccgtgacggtgttggtctttggggcgggtggtcagattggtcaggagttgctgcggtcactgagtgggcgtgtggtgtgtgccgtcacgcgcagtggacggttgccgaatgggagggagtgtgtgcaggcggattttgataggcctgagacattgcgcccgttgctcgacgcgcagcggccagcacaggtggtgaacgcggctgcttatacggcggttgaccgtgcggaatctgagcctgatgtggtgttccgtatcaatgcgcaggcaccaggtgtaatcgcgcattggtgtgcgaggcatggggtgccgttggtgcattattccactgactatgtgtttgatgggcagggtacgtctccgtacggtgtggatgatcctgtcgcgccgttaaatatttatggtgcgagtaagctggctggggagcgtgcggtccgggcggcgggcgggtgttctctgatcttgcgtacgtcctgggtttacgcggcgcatggccacaattttttacgcactatgctgcgtttgggtgcgacatccgagcgcttgccggtggtggcggatcagatcggcacgccgactgcagcggggttgattgcggatgtcactgcgcagttgctggcggggggggggcaaagtcggcatgcgggtatttggcatctgacggcgaccggtcaaacgagttggcatggttttgctgaggagattttcgcgcaggcgcaggcatgcggtttgatgatgcgggtcccgcaggtacaggccattgcgagtgttgggtatccgactgcggcgcggcgtccggcgtattcgtgtctggatacgacggcgttggtggaaacgtttgggatcgtgctaccggattggcgtcagggcgtgcggggtgtgttggacgacatcgtcaacaggtcgcgttaaaggtgcagggggatgatgtttgctgagactcggggcgagggtgtgtcttggtgtgcttggccatgccaatacggtgttgggtcgctgtgtatcaccagccgtgttgtaggtattgggaatgcagcagtggtcacgtgggccgctgctgcggccccgaacctgatgtgtcaagtacgaccatacgtatcttcaaaacgtacgatgtcatcttcgccgagatagctgcccgactgtacttcgatcaattcgagtggcagtttccctgggttacgtaggcggtgggtcacgccgagcgggatgtacgtgctctgattttcggttagtaataggatttcgctgccgcgtgtgacttcggcggtgccgctgactatgatccagtgttcggcgcggtgatggtgcatttgtaggctcagtgtgccgccgggcttgacggtgatgcgcttgacttggaagcgttggccggtgtcgatggagtcgtatgccccccacggacggtagactttgcggtgccaggtggcttcgggacgtccgtttgctttgattttgccaacgatctctttgacggtctggatgctgtcacgatggccgactaataaggcgtcatcagtttctacgaccaccacgttttccagtccaaccattgcgatcagacgcgatccataggcgtaggtgttgcggcagtcgatttggatcacatcgccctggtgggcattgccgtcgttatcttgtttggagacttcatgtagggccgaccaggagccgacatcgttccagccggcgtctagtggcacggcgacggcgtcggcggtgtgttccatgactgcgtaatcgatagaatccgctgggctgttttcgaatgcttctttatctaatcggatgaagtcggtatcgcgctttgctgcgctccatgcccgttggcaggcttcggcgattgctggttgaaaggtgctgagttcggctaggtagcgtgaggcgcggaataggaacatgccgctattccaaaaatagtcgccggaggccagatagctttgagcggtggccagatcgggtttttcgatgaagcgctcgacgggacgtatcgtgtcgttgccggtggctttgatgtagccgtagccaatttccggggtgtttggggtgatgccaaaggtgaccaatttcccttgggcggcggcttcggcggccacatggacggcagtttggaacgctgcttcgtcacggatgacgtggtcggacggtaggacgaggagtagtggatcgttgccggtccgtgttgcttccagtgcggccacggcgatcgccggggcggtgttgcggcctgtgggttcaagcagaatcgctgagggatacacgcccaaatgctgcaattgttctgcggcaataaagcggtgttcttcgttggcaacgacgatgggtgaatgcgttgtcacgggagcggcgcgtagccacgtggcttgcagcatgctgtggtggccaaccagtggcagaaactgtttgggataggcttcgcgcgatagtggccatagccgggtgccagaaccgccggataggatcacgggaaggatatcgttcataggcggggctgactccatgcagggggtgtgtgaggtgggaagcaaatggaaggtgttttaggcgcgcagtagcgctgaaatttcatcagtacgctgttttagcagtgccgcattgttgcgggtttccacattcaggcgtagtagcggttcggtattggagctgcgcaggttgaaacgccaatctccaaagtcggcgctgattccgtcggtatggtcgatcgtcggagattgtgctgtgtaatggtccatgatacgtgcggtggcggtgttggtatcggtgattttaaagttgatttcaccactgcacgggaattgctgcatgcggttttcgaccaggtcggccagggagcggccgctgcgtgagatcagttcggcgatcagtaaccacgggatcatgcctgagtcggcgtaggaaaattcgcggaaataatggtgggcgctcatctcgccaccgtatacggcgttttctttacgcattttttctttgatgaaggcatggccgctcttggacagtaccgggatgccgccggcagcctcaaccatttcgacggtgttccagatgagacgtgggtcatgcacgatttttccaccaggatgtttggacaaaatgacggaggctaacaggccgacgagatagtagccttcaataaaacggccggtgtgatcaaagaaaaagcagcggtcgaaatctccgtcccaggcgataccgaggtctgctccgtgatgcttgacggcttgtgcggtggcatcgcggttttcaggcagcagtgggtttggaatgccgtttggaaagtggccgtccggttcgtggaatacgcgcacgaattcgaacggtagatgtggggcgagtaggtcaacgattaggccggcactgccgttgccggcattgacgaccagcttcagtggtttaagggcgttgctgtcgacgtaactcagcaggtgtgtaatgtaggccgacttgtccagatactgatgttcggcggcagtggggggcgtaatggttgcgatgtcggcggcaacagcatcgcggattgtgaataggccggtgtctgagctgatcggacgtgcctgctcgcgtacgagtttcatcccgttgtaatccatcgggttgtggctggcggtgaccatcacgccaccagccgcattgcgatattgtgtttggaaatagacttcttctgtgccacagaggccaatattgatcacttcgcggccgctggcacgcaggccggctgacagtgcctcttgtagtgatgggcttgtcaggcgcacatcgtggcccaggaccacaggggctgctctgtccaactgtgtcgccagtgcgacgccgatgcggcgggccaagtcctcgtttaattcatccggcacgcgaccgcggatgtcgtaggccttgaaggcgggtagtgacatgagtaactcctggctaaatgatggtgaagtgtagctggagctagcctgtttaggtgttgcaacaggttgctgggagtcacgaagagcgcagtatttgtgtgtatgcagcgatagtgggaggcggctgaatggattagatgttggagtgctcaatgatcggtgtgcgggtgatgttgagccaactagatagagatagatgcgcagcttattcggtcaggtgttcaatacaaatcccagcgacgttaatgaagacacggtatcggccagtttggccggcttttggttcaaactatcgagcagaatcgaaagggtattaggttctcttggtcgccagtttgctgggcagggttacctatgggaacgcacagatagcgcgcaaaattttgagttgaactaaggttggcgcgtctttagtgatgattgcgggcgatacaccgtagtcaaattggaatgtgttggccatcagtaagctgttcacttaggctggtggtgtacttcttaccgatatgtgcaacaaggcgttaccaaaagggctaggcagctggaatatatccagctgcctagtctgcggcttaagcagattacttagcgaaggtgccgttaaagatggaggacataaacccattggtgtaggaatatatgacatccttgtcgaggacaaagccggcgatggcaccgccgatagcaccagcaataccgccatagaccatgccgacgccttggccgattgatccaacacctaaaatgccaccgccatcaccaccacgggttccaccccagatggagccagcaaaaaaagcagcaacgccacctacaatagctgcgctaagccgcgaaccgagatcggcaccggatacgttgtcaatttcggtcaatgtcaattcacgcataatttctctttgctccaaggttattagaagaacatcccgaaccatctcggtaattcagagttagagattttgttcgagataccggtgaccgatcattggaaatcaaatatttaattcaataatcgatcatcgctaatattttcctgtatcggtaaatgcgcggtgatgccgtagttaaatatctattatcggattatttctatcgaaatattcaatcgttgcttgactgactttcattatccgatgtgatattgtgatatacatctctcaataagagtgattaaatttaatttttaactattttaggagatataaatatgcgtgaattaacatcaatcgaaatgaacaatgtgtccggcggcgaccttgctacgcgtattgaggcaagcatcgttttcggcgtttctgccttttttgctggctccatctggggtggaacccgcggtggtgatggtggtggtatcttaggcgttgggtcaatcgcccaaggcgttggcatggtatatggcggcattgttggtggtatcggtggtctcatcgctggcttcgtccttgacaaaaatgtgacctacaactacgccgttggattttataactccctgtttaacggcaccttcacgaagtaatccgtggagattggcggctggattatcttgatcaagatatttcggctgcctttatttttatatgatcgcattggcaggctgcgttggataaagcgctgtcgcatacatccaatatgaaggcaacttcattattaataaataagccaacgtaccaagtaagccgatggctttatagaatcactttttaatggcgtattcgtgaagtaagctggttaaccggcgtgcttgggcagcttgatatatcctagttgtgtagtccgtcgctgatggagccagcaataaaaaatgtctctttgctccaaggttattagaaggacatctcgaaccttctcggcgattaaaattagagattccgttcgagacattgacgatcaatcatggccaatatcttccggtatcagtaaatgcgcggtgatggcgtagttaaataatatgattattttttatagaaatattcaatcgttatttgaatgactttcattatccgatgtgatattgtgataaaaatcactttattagtgtgattaatattattttttaactattttaggagatatgaaatatgcgtgaattaacatcaatcgaaatgaacaatgtgtccggcggcgactttgctacgcgtcttgaggcaagcatcgttggaggcattgctgctttttttgctggctccatctggggtggaacccgtggtggtgatggcggtggcgttttaggcattggatcaatcggccaaggcgtcggcatggtctatggcggtattgctggtgccatcggtggtgccatcggctgctttgtcctcgacaaggatgtcacatattcctacaccactggatttatgaactccctgtttagtggtaacttcgcgaagtaagctagttaagctgcagactaggcagctggatatattccagctgcctagtccttttgataacgtcttgttgcacttgtcgataggaaatacgctattcgcttcaataaataattgcttatagccaatacattctatttcattgcggtgtattgcccgcaaccatcaatgatccaaaaaacctttgggtgccgtattccggctggtaataatgatgtgctcatgtcgctgttgaagcatgtcattcgaatggagttcgccgcgtgtctggggggcgcatttcaaaaaaaacattattattatgcgtgctgtcttttatttatttgtaacgcatgaaggtaaactttataaataaattaaaatttaccttcccggtcaagaatgttttgcaaagcgaattcgccatggctgcgaacgcttatcaccgcaacggtaggtagcttctacacaacctcatgtccgagtttgtgcagtaacaatataaagcggctcaacatgacgcttggttccatcattaagtgcaaaccaatgtgagttcggcgaacgtttgtcgcttagtgttggctactgaggtcgaagccaaattcctattttggttgtgctgtcggcttgaaccatctaaatcatggggttgtactagacggtcgaaattgttcaagaccgcgaagcgatctatgactacatcaagtcccccaatctaatcgttattctgcccctttgatgcgttgtttgagggaaacgttgacacgctactagctaatgacgccgatttcatccgttgtagtggcgttatagctatctcagaactcttaataaggcaacactgcatcttggtttataacctagccgaagacctgatgctcgtgttttgtgtttctttccccattgcgtatcgcctgcttgatcttttcaaacgtaccaagcaatgcttattaatagtaatcctattgatgcacgctgcttgtctacagatgactcatctttgatcaaatatataaataagatgttgatttcgcctgtctcccgtcacatgatcgtttgtcttcctagacaaggatgcggcccattcatgttgcattgtcatctttggttaaattgctgttggcagttagtttcaccgtttcgctatttctttttcgaagtgattcataaaaaaacggctctgaattgttagaagattagatatttctctccgacgtttctcccctcatctagctgctctagaatcaccttgtgctttctgtcagttattctaacgggcgctgccgtttaattaaggatggactttgttcagtttgaatatttaatcaatggtgacatggtgagggtgcggttaactagaccctagtgcccatgactatttattgagccggaaaatcttttcattctacccgtgacctttgaaaggcaatgaatgatttgtctcattgggaatcatgatattcatcaatgcacctgaagcgtctcattgcctcgagccgaagtataaagtgtgatctgcacttaaaaattcatttaatggcgcggcctttgcgatactcagcttctattactcatttcgattttatgagaatttcacacgcataagtaaatcttgcttattcgcagtaacgcgctgtagaaccaccatcaacgcagtgcaactcatcttcggtcatcttatgcatatagtgctattaagattcgcgtgctatttcctagatcgttactttggattgcattgaaattttacacaataatcttatgggaagagggactatctatcgtcgaccagaaggcctgatttatctaatttaagaagatcgctatgccaatgttaaaaattttattttttattttgagacagggcatataacatgtatttgaattgataatttgataacaatcataagaatagagttacaaagcagtggcatcccataaataaagtaaaagcgaaaagtgttattgattatcttcattaaaggataaaaatgaaaacgacattttttcccaatagcatcctgatattaacgttagtttctttcttgagtgcctgtggtggtagtgggttagttcgcccatcgacaccaacgccaacgccaacaccgacaccgacaccgacaccgacaccgacaccgacaccgacaccgacaccgacaccgacaccgacaccgacaccgacaccgacaccgacgccaacgccaacgccgataccaacgccgataccaacgccgacaccgacaccgacaccgacaccattgcctgctttggatccggcgttagctgccaagtttcgggtgcacctagatggtacgaatacagagcctgctcatacacttggctttactggcaagggctacatgattggcgtcgttgattccggcgtgaatcgtaaccatgtgacattgcacgataaggtcgtccacaacaatgtgtatgtggattatcaagaccccgccagtccagatgatgtgagtggccatggcaccaacgtggcacagctcattgcggggcaacccgttgaatactggcccggtggtatcgcaccaggtgcgactatcttctcagcgcgcgtcttctcgtctgcagcagaaaatgcaaagcaaggtccaataggcgggaacttttttgaaggagaagcagcgcagctaaaacgcgtcaatgccgacatgattgccgcaggagtgcgtatccaaaacaactcctggggatatgagaatcagaacaccggcgataagcaggtatggatagatccagcggtgacagatgctttcgtgaacgtataccgtgatttcgtgctgaataacaatggcttagtgatattcgccagtggtaattacagtcaacagcaaccgggtcgactttccagattgccgagcttgcccacggtggaggggggggcatcgcctgccgatctggaaaggggctggttagtggttgctgcactggatagtttcgatcatcccgaccaattgacttcgtactcgaaccactgtggcatcgcaatgcactattgcctagctgcaccaggtgatctcattgaaatcgatcctaacgttacaactagcccagtggatggtgataaaggttatctaaatggttatttaatacagaacggcacctcgtttgcagcgccgttggtttctggtgcagcggcattggtatgggaggcatttccctatttcagcaacgacctggtgcggcagaccctgcttggcacggcgactgatcttggcgcccccggcgtggatgaagtcttcggctatggtgcactgaatgtgggtaaagcagtgctgggcccggctaagttcgattggggtgatgtccaagtcagcttcgatgacaggcgttccacctggggcaatgacatcaccggcagcggcggcttgatcaagcgtggtaccggaacactggtgcttggtggcagcaataatcaatacaccggagccacccaagtcctgggaggtacattgcaggcgtccagcttgggtgcatccgcagtcagcgtttctaacgctgcgacgttgattggtagcggtcgcttcggcggtgcggtgagcaatgctggtaccctggagcttgggaaggatgggctcaaggtgcaaggtgattacacccaattggagacagggcgtcttgcactgcacgttggagatcagctgagcgtggctggcaatgccaccctgaaagggggggaactccaagtgttgggtaaacgtgattatgtgaccttcaatacctcctacagcgtattgcaggctgatggtagtttgaccggcacgttctcgcagttgacctggggtccggctgtgctgcttggagaaggtcgtctgacctacggcgctaacaatgcctacgtgaccctgcagcgtctgaatgtcagcgcggcggcacaggccttggggatcgttgatagagttgcgcaggcctctgcccagcgtgttgagcaggcattccgtgcaattgatgcacagcaggcgcaaggccgtggtgcgttgcccaccagttttattggggcggcggcggcattgcaacagtccagtagcgcggcagtggcggcgggttcgttgcagagtttgtcggggcaatcgcatgttgcggcggctttagtgagcctggatgccattgatttgggtcgccgtagtttggcgacgcgtctggatgcgcctcgttcgggcgagcgtattgtgacgtggcatcaagccttgggtggtccggggcagaatggtgcggctagcggcaccttctctctgtctggttggttggtgggacatgatgcgcaacttgcctccggtgacattgtgggtgttgcttttggtcagaccgataccagcccctctggtagtgcctttggatcgcgtgggatagacagacaagtgcaagggcgtgtgtatttgcagcgcacccaggggcccttatatgtcttggggcagcttggttttggtagtttccaacgtcgcctggaccggcagttgcaactgggtgactggaatgattggacatccagtcgctatagcggtcagttttggagtggcagtgtggaggctggctatcactggcaccagggaaccttggcattgaccccgtatcttggtctggatcaaacgcagctgcggacggatggattccgtgagcagagtggctctggctttggcttacaggtgcagtccgcccaagcgacgcggagtcagttactggccggtgtgcgtacggaatggcgctgggctggcgtgcaatggcgtggttatggtgaatggcagcagacgttgcgtcagagtggtttgaatccacaggccagctttacagcgacttcgtcgtggacgccgttggtggcttcgtcctggcctggtcgttctgggggtgtgcttggattatcgatggtcttgcctgtcggggtgaccgcaggtctgtggaccatggggttagagcattactttggtacacgtagccgtggggagagtcttggtctgcgttaccagcttggtttttagtatgaggtgatgggggataccggcgtacggtagtttcgtgcgtcggcattgtcacggatgggtgtgttattggtgatctgatgcgttgatggcggtatgtttgcagcgcttatccataggtagggccagtttttactgtttattacgtcgtcaatcacgtcgtcccttgtgcgtgctgttcctaagttgctagggtgggtacgttgggtagcacgatgcatggcgtaatgtgcggctaccccagaggagtaagttcaacagaaacaacgtgatttccagcagtgctgccattggcggcggtgtggattgctacagcatcaatggtgatgcattccatgcgcatcaattccatgcgcatcattagggtggccagatgatggataggctggatgtttcgtttgtccaagaggacccatcccaggaatggttaccgtagtccctggtacgttttcgtgtcctttatggaaatgggttctagacgttgactgcttttttatcgagacaatattgacagatgccagctgcgacgaagagggctactgcaccacagataatcgcgggtgtgacagtgttcaatctggagtgcagcaaactggtcagcagtggaccgagaatttggccgataccgtaggtgagggtgacgagtccgagtaagttgatacggtgtggtgcgctgacttgtcgagtaagtggcatcacaagagatgtcgttcccatgaaggttgcgccgaaaccgatgcagctgatgactaagagaaagggcgcttggctgagtagtgtcagcaatacacaacagccttgaatgagtaggttgatggtcaggcagcgtcgtgttccccagcgctgcgccgcccacagccaggcaaagcagctgggaatgatggtcagtccgaccagcgaccagagatgttcggcaataaaagggacattgaacgtttttgcgatcagtggcaggtaggtggcgatgatgatgtagccaaatcctgcacagccatacagtgcagccaattgccaccagagaaaggaattttgctgtactgggaaagatgcgctggcctcacgaggcttatcctccacgtgtggtgtcagcacaaacagcaatagcagcagaataaaggataaaacgctagctccataccataacgcgctggcattcagtccatgacgtaggccgataacaacgtattcgttgcccaataaaattccgataccgacgccagcgtatagggacgcaatcacccgtacattaaatgtatgccgcatgatggtgatggagccgaaaatcatcatggcggcgctggagacacccgctgcgaaacgaatcagcatcaccagaaaaaaatggctagtgaatgccattgcgaagatcagtacattggtaacaatggcagcgccatataacatcatggtggtgcgggatgtgttgcctaatttgccgaaggaaaaaaataggcttcccagtagatagcctgcgtagttagcgctggcgatataggaaagttggctaaaggtaaattggccttcacgcagcatgaccggcaggataggtgtatgaagaaaccgtccgatcccaataccaagggagagaataatcatgccaaacaatgctgttttaagatgatttaagttgctggcactctttttctcttccaatgttttcatgctgttattgctttagtaatgaggaccacagtgtggttttcagtttatgggaaagccaagtggaccatgtgtggctgaaataagcgtgttacttggtcatgggagtgatcgcgtgtgtggcattcgcattgatgtcacggtgcaatgtttggagtgattgtcacttcttatggatagtagtgattctgatgaatttatgcgtcaatcgggatgttggttcgcacaatgggtgctgtgttgtaccacaggtgttagggtttcatgttgtcgtgcggatatgaaatgcctgttaggtttgactggcggtattcaaagcgtgcattgattggtctgctcgttgcacatgcgcatagcctgtgttgatgcatgacgtcacatctatccactggtatttgaattggagtgtatttaggttgtcgtactgctgcgcctgggtggcgtgatgcattgagatatgtcgtaaggatgcagatgtgttgcaatgacgtagagtgtttatttctcaggtgcaatggttattttcggagtcgcattcagatgggtggatctcaatgtcatgttaagttttttatttactttgtgttgatgagcgttgctttgtatcaatcaaaatacatgtgaattttgtatttggttgtaaaagcaagtgtggaatggttgtagaacgatcgggtgaattatttcgtcattcagaatggacgttttattgagcgttatagatgtgaggtgttttctatgtctttagcgctattgttttccctgttttaattatctttgcatcctgttgctgatggttttatcagtgccagcaacgttctgtctttctttacagtttagttggatgatgtgccgctatgctgtgccaaggcacgatgtactgcgcgtgcgatgttgtgatttgtttttcaattgtctggtatgagcggtgagatgtcgcggtcaaaggtcagtgagaagtggccattagtgatcgtggaggattgcaaatggacgttgcctagcatggcggtcagtgctggactgagctggtacaccggttcgcggcgagcatagtcttgcaaccaggtgttgatgaactcacggatttgttcatcgagttcgatgccagaatgtgctggtttgaaatgctccagggtgggttgatcaaggaagaatgcttggcgtgcactatcgtagtgcatcgcgctgctcagtccgacacgccctagcggggatggctggccgccaccgctggagatcgccaggtcgaatgagagtgtcattcgatgaccgggtggaattgcgatgtgtggttggctggtgcttagttcgatcagtccgcccagcagtgtttttgtttgtgggaagtggttggagacaaagggttgtatgtcctccgctggaatgatgatttcgcggccatgaatctgtggagcagcatttactgctgtggttgtgatggatagaaacaacagtaggccgaggagggtatgacgatgcatggaatgatgtgatcgtatgtgtgtcgattgtgggtgtgggacgattttaaaggcgtgttgtctgtgattgcagcgcctcttgatggaggcataggtcatcgggtcgcttggtatcggcatgttgctgtttattgcgatgttcgatgagacgattcaagcaagctgttgggtgggattaagccgatactgatgtctctgttcatggtcactttctatccagtgcatcgcagatgataggaatggcgctctttaccttaatggttttgttgtacacgatgggctgcattggcagcgaccagcaatattgatcgctatcaccgcttgctggaagcaagcggaattttcggtgattgggccttcaatgacgtttcaagtcagtaagcagactgtaggtgaccagtgaggggtgttattcccaggcaggtagctgtttcggtacgctttgattttttagatggacgtgtcgcggtaatccgttgcgttcgtagggcatgggtgtttcgccacgaatcaatggttcaaagtaggtgcgtgcacgttcgctgatgccgaagccgtcacggcgtaaaaagcttgctggtaaggttttttcgtggttggcaatcttggtgagtgctgccggctcgattttccaacggtatggggtgtcagaggtgcgtacgatgacaggcatgactgcattcatgccttccagtgcgtagcgtactgcagctttacccacagcctgtgcttgttcccagtctgttttggaggcgatgtgccttgcggagcgttgtaggtaatctggcagcgtccagtgcactttgagtccgagtgtctgtttcactcggctggcgaggtaagcggcgacgccgccaagttgcgtgtgaccaaaggcatcggtggtgccgccagcatcggcaacgaagcgcccatcattgctgcggatgccttcgctggcgaccaccacgcaccaaccgactccgtcgactacctgttggactttcgccagaaatgctgtttcgtcgtaggtacgttcagggagcaggatgatgtggggggcttcttcctgcccttggccggccaagccagcagctgcagcgagccaaccggcatggcggcccattgcttcgtaaatgaaaaccttggttgaggtctcggccatcgctgccacatccagcgcggcttcgcatatggagacagcagtgtactttgcggctgaaccgaagccggggctggcgtcggtgatcgccaaatcgttgtcgatggttttagggacgccgatacagtgcagtggatagtcaaatgttttggctaactgtgagactttgagcgcggtatcggcggagtcattaccaccgttgtagaggaaccagcgcacgttatgtgctttgaatacttcaagtaaccgttcgtacttgtcgtgatcggcttcaagcgatttgagcttgaaacggcacgagccaaatgcacctcctggggtatgggtcaaggcacggattgccgtgattgattctttggatgtgtcgatcaggtcttcacgcagtgcaccgaggatgccattgcgtgcggcgaggactttaacgcggtgtgaccgtgcttcggtgatgaccgcggcggcggttgcgttgataacagcggtaacgccgccggattgggcgtataacaacgtctcttttgccatgtgggacgagctcttgtagggcgaggacattgccgggacatcgcttggatgcgttaagctgcgcggcatcatggtgcggtgtaggcagagggtcgaagtgtaaccccgcttgccgttgtttttttctatatggagtgaattaatgcgattggttctattgggaccacctggttcaggtaaaggcactcaggcggcgcaaatgaaggaaacattacagattccgcatatttccactggtgacctgttgcgcagtgaagtggttgctgggactcctcttggcctacaggccaagcaagtcatggcacaaggtgatttggtttccgatgcgattctgatcggcatgcttgagtcacgtttgagccatacggatgtagtaaaaggcttcatccttgatggctatccgcgcaatctgtctcaggccgctgcgctggatgggttgttagccaagctcgggcatcctttaaatgctgtggtgcagcttgaggtacccaccgatgtgttggtggaacgtattgctggccgtgctcaggctgaaggccgtgaggatgacactcctgatgcggtgcgtaagcgtttgcaggtctataacgattcaaccgcgccggtcatcggtttctatcagcagcgcggcatcttgttgcgcgtggatggtgtggggcgtttggatgaggtttcccagcgtattgtggttgcactgggttgctgaagtcggttcacgtgactttaggatgtgggggaagaggtgcagcatcaatgaaggccggtcatgatgccacttgggttcagaggtcctctttacttatctggagcaggcaagcgtattgacttgctgaaatggggtgttgccgttaagcatgcgtcactgtggtgcttaggttcagcacggggagtgttgctgttggaagttggagtgggagccagtcgctgaaatggctcttctgaaatagacgtttatctgctgatgtccgtagcgttgcactgatcggtgacaatggcccgatgaataaactgcatattcttggtattgccggaacatttatggggggcatcgctgcgctggcacgtgaattggactggcatgttgcggggagcgatcaggccatctatccgccaatgtcagtgcaattggaacggcttggcatcacattgatgcagggctatttaccggagcatatcgctgcggattgtgctgaggtggtggtagggaatgcgctgtcgcgtggtaatgcagcggtagaggcgttgcttgatagcggatgccgttacatatcggggccacaatggttagctgagcgggtattgccagggcgcgacacgcttgcggtggcaggaacgcatggtaagacgacgacaacgacgatcttggcttggttattggaggcagccggacgtgcgccggggttcctgattggtggtgtgcctgagaattttggtgtgtcagcgcggcttggcggcgtgctgagccaggggagtatggatccgttggtggcgggtgaggtgtcgacagctgttcgaccgttgtttgtcgtggaggcggatgagtacgacactgcattctttgataagcgcagcaaattcgtacattaccgtccacgtgtggcgattctgaataatctagagtacgaccatgccgatatcttccctgatgtggctgcgatacaacggcaattccaccatttggtgcgtaccatccctggtcgtggtcggctgatcgtgaatggtgaggatcaacgtttggccgaggtcttggcgatggggtgttggacgccggtggagcgcttcggtttcgatcctgagttccactggagtgcgcgtttgattgctgccgatgggagccgcttctcggtctggcacgaggggtgtgaggtcggtcaggtgcgttggtcgttgctgggtcgtcacaatgtactcaacgtgctggcggcgctggcggccgcacatgcggtgggtgtcgcgccggcggccgtgattccgtcgcttacgcagttccgtagtgtcaaacgtcgcttggaatgcttgggtgagagaggggcggtgacggtttacgacgactttgcacaccaccccactgcgatcgctaccacgctggaggggttgcgggcgaatgtgggtgatgcgcgtattgtggtcgcgatcgagatgcgcagtcattcgatgcggctgggggcgcatgcgcaggccttggcgccgtcgctacaggcggctgataccgtggtgtttctggatcatccaggattggtgtggaacgcagcaggcgtggttgcacagatgcatggtcaggtgcatgtggttcatgatactgaggggttactgtcgatgctcaatgaggtggtacatgccagtgaccatgttgtattcatgtctaatggtggatttgatggtgcaccacgtcgattcttagcgcagttgcgctaagggggggggggctgtgaatgtgtgcagcgagaagcaagctacggtttttgtgtagtgcctgtgtgatctggtgtctatgctgaacgcctccgtatcactattgcagactgatgatccgcgcatcggtcggtcttgtgacgggacacaggctgtactcgtcatgtggagatcttcatagatgatgtgcgtggtttctactgccgcccggctgaggggcggcgcggtgattgatcaatgggacgggctgaaggattcaacggtcacttcttatcttgtagggaggccattcggttcctgagggataatgggcgcaccgggtggggctgtgggtgtccggttatcgatcagcagtaccgggatgttggtgtctgggtggtgttcttcccgatagtgcaatgcactgagtgaggattgcaattctttcagtgccaggtccacgccacgcaacggataccagaggcccattaagctgaaatggcgatcatagtgcagtgtctgtaccgatcccagccagagtggttgttgttccggctgcaattgagtggctgttggccataggcgtagtacatagcattcgtctgcatatgggctgttacgtaccatcagcaatgcttcaacgcgtgtgtccaacgtggccggcagcaccggaacagtattgggttgggaattgacgtcgagcaagtgcaatgcttccttccagccggtttgcggctggcgtcgccatccctgggtttccaagtgttgctgcaatggcaccagtgaaccggccacttggacgttgagcggccagcgttctgcatcgtcgaactcgttacggcgcgcgggtagctgacgccagtcatttttccaccagccttccgcagcgattgcgcgtggtgatggtggcggcggttcgaacttagttagcttctgttctagatggcggggggccatcactattgcagcgattgagaaggtgccataaaacagccagcttaaggggttgacctgaagttcatgggtgaggcgtcgccgataagcgatccccagtaccaggagccagaagatgccaaatagcatgccgccgagcacgtcgctgagccaatgtgcacctaggtacagtcgtgcgaaaccaatcagagaggcgagcgcgccggtcaccatgtatggccaaacccgattgcgtccggggagttcccgggcgatcagtacggcaaagaagcctaaggtgatggtgacgatcgtgactgcaacggacggaaagccaaagccgctgctggcggctggtggctgcacgacatgcatggtcttgccgagtaaccaagtgaaggccagaccaaagccgagtgcagccaaccagtgcagtagcgccacccagcgtttgtgccacgccagatacgccatcgcaacggtaacggcgggcaataggatttgccagtcgcctagcgaggctaaggctgtcattgggtagtctgccaatggattgcgcagtgccaacatcatgttgttgactgcaagatccatcggtagtggttcaccatggaccaggacgaccatgaggagtgcaaaccagctccagcccagcaggagcagcatcactgcgagtactgccagggggactgactcgcgcctttggggatcgaagaccgagattgaccagcgtcctagagtgggatgacggtgtgaccaggccaataggcgggcgatcaactggtcaagattcctggctgcccagcggtagctgtataacaccactgcccagaccactccgaggaccagcaggagtaatccgatgaccagaaggagccgtccggcgacggctgccactgcgtcgtaggcttcgccgagtagccagcctggcgccaggaacagggcaccccacgacagacacgctaagccgctggcaaaggtgtagtgtttgagcggcatacgcagcatgccagcgatggccggtacgaagggacggaccgcgccgacgtagcgtgccaccaggatgctcttgaatgcgttgccgcgaaatagtgattcgccacggtccagtaattgcggatagcggttgaacggccagatttcgcgcaatcgatggccccatcgatagccaacccagaaactcagtgcatcaccaacgaatgcgcctagcgatgcgcatgcgactgcgtagaggccgttgattttgtcgagcccgatgagcatgccaacagcaaagagcagtggcagtgctggcacgattgcaccgagaatgatgagtgcatcgctaaaagcaatggcgaagatgacgaagccggccagtgcaggatgttgttcaatccatgcgagtgttgttgtaatccagggtgtattcatgttggaattatagggtgataagtcatacgctttttttctagcggcggggcatccctgaaagtcgcttgattgcactctacaatgtgtgaatgtctaggcctttttctgtctccgaaacgctgaaggccgattgtttcggtcgtattttgctggtaaatggaaagggagagaagttcatccggcgtgatcttggtgccgtgtcatggtggttgcgtggtcttgcggggtggctggccagacgtgaagttgcagcactgcgccaactcaatacgttgccagcggtgccacggttgctgaactgggatggggtgtgtctggatcgcagttttctgtctggtcaaatgatgtatcagtgtccgccacgtggtgatttggcttactttcgtgcggcgtgtcgtttgttgcagcagatgcatcgttgcggtgtcgtccacaatgatcttgccaaggaggcaaattggttggtgctggaggatggcagcccaggggtgatcgattttcagttggcggtacgtggcgatccgcgtgctccgtggatgcgtttactggcgcgcgaggatctgcggcacctgctcaagcataagcgtatgtattgtccggaggcgttgacgccggtagaacggcgtcttctcaagcgtccttcatggatacgtcggctctggtttgctactgggaagccggtgtatcgctttgtcacgcgccgtgtactgcattgggaggataacgaggggaggggagcaaagccttagcggtgcatcggtggcgctgtggcagcgatcctatcgttgctgtatttcctggtttctggggtggctggtaaggcatcgttggtgaatcggtagccgcattgcagtgcatagcagtcatgcagctgctaagacagtgtatgaaagagcagccatgtcggcgttggtcggtgtcagccagcagcaaatacgtacactgtgtatcggggattgcggtgccagtgtgtcatgggcggtggcgggttgcagtcgtattttgatgaacgaacgatggctagcaccgttcggtgctgtctggctgggtccttcggttgcttatctgtagcgttctttcagcatcgcccaagccgagcgtagtcccagtgcctcgccacctgctgggcgcccggggcgattgaggtcgttccatgcgtaaacatcaaggtgcgcccaaggcaggtcttgagtgacgaatcgttccaggtacagtgcggcggttactgcgccagccatgcgtgaaccggcgttggccaggtcggcaacatggctgttgaggtagtgcaaatatgggcgccacagtggcatgcgccacactgggtcgcgggtctgcttaccagcatccagccaggcctgggccaacacctcgttgttactgaaaagtgctggcaggtccggtcctagagcgatccgcgctgcgccggtcaatgttgcgaagtccaagatcgtgtgtggcttcagttcgttggcgtatgccagcgtatcgcacaagatgaggcggccctcggcgtcggtgttgtcaatttcaacactcactcctgcccgcgtcacaatcacttctccggggcgaaaggcatcaggtccaattgcattttctaccgctggtatcagcacggtcagtcgcactggtagttgttgctccatcaccagtccggccagcgctagagcgtgtgcggcaccacccatgtctttcttcatgtggcgcatgccgtcggcaggtttcagatccaggccgccagtgtcaaagcacactgccttgccgatcaggactaagtgaggatgggtgtgttgaccccagttgagttgtaaaaggcgtggcgcacggtgggaggcgcggccgacggcgtggatggtgggaaagttttgcgtcaatagtgcttccccgatgatgctttcgaatgtaccgccgtgtgtctgggccaagtcgcgggtaatcgtttggagttcttccggacccatgtcctgggttggtgtgttgacccagtcgcgtacgcgtaggcacgcctgaatcagtgccagagtttctggtgttggtgtaacggccaattccgccggtgcgcggtctgggagacggtagcgcgtgaagcgatagctacccaggccccaacccagtgtcagggtggcttgcttgatggggtcccatgttccggtaggttgccagtgggtgccggctgggagtgcaaatgggccgtgtgcataggcgtaggggtcagcgtagtcacccgtgcccagcactgctccattgaggccgtgttcgcccggtagtagcagtacactccctgcggcagcggcaaagccctgtgcctgtacccatgattgaatcgccggtgattgtgcggtcaaccagttggcgaagcgtgcgcgatcgagtacatgcaatggcagtgtattggtggtagcaacagtgaaaccgaaggggatgggcataaaccaagtctcttggtggctgtagtcagatgcggcgatgggggcgttgtgcgctgtactaccctgttcagggggaaatatttgcaagcgtccgaagggatgtcatgtacttggagtgatgcgctattccaacagtcgtgaccagcgctgcaagtcctcaattcggctcagcaccatcttgatgcatacaagcatcggtactgccagcaagaggccaatgagtccccacagggagccgaagagtagcaacgccacgatcaacatgagtggcgagatcgccatgcggtgcccgaggatgattggtgtgatgagttgcccttccagcgtgtgtagcatcagatacagcagtgccggtagtaatgctttactggattcatgaaattgtactaagccgatgagtagcatcagcaatacaccaatgagcggccctacatatggtgcgaagttaagtagggcaaccactgtgccccatagcagtgcttcttgcagcggaatgcttagcagcaacagtaaaccgctgaatatcaagccgacgagggcgtttatcacgctgatagtcagtacatagcgtgagatctcgtgttccaggttgcgtaggattgaggcggtgaaacgttgttgatgatggtttgggagcagtgcaatcgctttgcgttgcagcttctccccaaaaaccatgaagaagaatgtcaataggatcactcccaagaccgagatgaccagtttgtgtgtgtccatcagtaaggtgtaagggttgtataggcgggtgcgcacagtctgggactggcgttcggtttcaccatcggctgcgcgtgccaagctttctactgcttgattggcttgttgcatcggtttggtaaggtggcgtacttggcgtgctaattggcgtattttgtccggtgcttgttgtatccattcgctggctggtcccgcgagttctacacttagcaccgctgtcccgctgattcccaagcacaacaacagcaacgccccaatggcgcgtggaatccgtatatgacccagtgcgcgtaggatggggttgcctactagggcgaagaatacagccagtaatacgggaaggatcactgcctgtgtagcccacagtgtgtaacctactgccaatgttgctaatacaacgagtgacagtggagcttgggggcgtgccgtcagtggcgagcgtcgacgcttgattgcatctgcatcgttgttggaattgttgtgtgtcggctgatcggtcatgggggggacagaatcagaaaggggaatgatcggtgactgagtacgtccaagcaccggcctacatgtagcgggttcaggcgtgttcggataggttgattatgtctgctgtaggttgtgatgtggtgcttgtgtggctttcctcggtgctgggcttgtcctgtttagaggcattgtctgcgcatgtcgtcgtaaaaaatgtcgacatggcaccgagtatctgtatcaagtgcttagcactgctgaatttatcagtgagcgtttttaaagtaatgctgggctttacgcgtcctgcaatgaatcccaatccaagcccagttatcacgatgcgtagcggtgtccacgttgcttgccagctgtgctggagttcttgccaatggttgcaggtttgtttactgcgttcttctactaagcgttcggcacgttccacacggtggcatagtatacggaagctcatgagcgatccttctcggttgtgagctggctttcgtctgttccgtgcagcagggcgaggcgcagcaattggcgtcgtgttgcgtgtaatccagtgtggcgtaaatagtgcagcattcgccacactgcaagtccagtcatgatcaggttgccaagcgcggttagtatgagtgattcgagccatggcaatcccatgcgctccaggagtgagatggttatgcctatcagcagtaaccaactggatacgccgagcacaatcatgatgcaggcccagataaaggcgtgaccaagcgcgctccacgccatctttagatctgagagtaaaagaagataaaaggcgcgaacggtagccttggatgaagcaaggctagcgcgtccggccccagtcacggtttccacgctgtcttggatgtcagagggattcacgtcagccacagtgctctgggatacgcggtcggcagtatcctgattgttcacttgacttacttgtcgtgattatttgaaagcttagcaatgacccaaccggcggccaaagccacgcccaatgaggtgagcggtcgttctcgaatgagctcggcagcgctgtcaagtaggttacgacctttgtccatcagagcgtcgacctgttctttagctgccgcggtgctgaattctgcggcggccaagctggcttgtgcactgtcggatagttgagctttgacgttgctcctgccttgtttaagttcttcgctggcggcaccagctgcatctttcactgcttcgcttgcagcgagtgctgcggatttcagacgcgctccagcttggctcaagttatccttcaggtgctcggtgttggtagggttcatcattaagatctccttcgttgagcgtggcaggccggtcacactttaccggtaccgttcgatgaatagaattgtaagtcgtgcatcaagtttctgtgtcgacgcttaagtaaagcgcgtgcccagtgcatcatactgcgtgttttatcacagcacactacatacggcagttctgtgtcggtgaggaacgtttgcggtcagttggctagatcgggggatctgccgatcaatgtgctggcgatgatgtcaacgacagcgcatcagcgcatcagcgcatcgtactgggtgttatcacgtagcacacgcagtatcagccgttgtggtgggtgggaaaagcttgcccgccagctcgccagatcagagaatccaccgatggatgcggcaatgatgacatctccggctaccaacccattggccgcagcgcggctgccgtgtttgactttgttgaccatgactccaccgactcccgattgacggagggactcgggcaggtcaacgaagatggcgcccgacagtcgtgaatccagcgtttctccggcgattgcgcgtggcaattctttaagtgtgaggcgtattttgagtggcttgccgccacggtgtacttccagtgttactgagctaccgacgggctgtagtccttcgtagttgtgcaatgtttccgcgttgtccaccctttggtcattggctgccaggatcacatcacctggttgcagtccggctgtggcaccagcggaattgggtaatacgcgcgtcactaatgcgccgtgtggattactcaggcctaagcttcgtgccattcgtgcatcaatattctgtgtttgtacgccgattgtcccgcgtaccacaacgcctttcgtgaccaattgctcgacgacgttgcgcgctagattcgaaggaatcgccaggcctaagccgatgttgccagccatgctgccctgtgggttgaagctggccgtgttgatgccaaccaactggccatgaagattcaccagtgcgccgcctgagttacccgggttgatcgatgcgtcggtctggatgaagttttggtaacccaggccgaggatgccactgcgacctaccgccgaaacgatgcctgaggtcaccgtttgggtaaagccgaacgggttaccaatggctacgacgaagtcgcccacgcgtaatttgttactgtctgcgagtttgatttcggtcagtttatttgctttgatccggatcaaggcgatgtcggtgtctgcgtcagaaccgaggaactcggccttgaagctgcgcccatctgctaatgtcacctgcacggcgtcggcattttcgatcacgtgatgattggtaagtacgtagccattgcgcgcgtcgatgatcaccccagatccgagcgactcattaatgcgttcttgggggatctctgggaatagccgacgtaggatcgggtcgtcgaaaaatggattgcgcacccgtaccacttgtttactgttgatgctgaccactgctggcatcacttgttgcagcatgggtgctaacgatggtagcggctggttggcagccgtggtttgaggcaccgtgcccgttggcagtgatgatattggtgagatggcattggtgttggatgccgcttcggcccggttgtcaagccaagcattcatcccagtggcggcaaaaccgccgaatgcggcagcgatagatagcgtcagtaaagtaggtagcggtcgcattttgagattttcaaatgtggtcagagcacagatggaatagggtcggctgctggataaaccaacccataatagagtgcctccactccatttaacttatgatgaaagtatatttagtgttgctgtttgccgagtcaattttgatagatgggatcagtgcgggtatcaatgcgctgacatcagtgttatctcgttttggtgatgtgtggtgacctctttatataaaaaaaactgggaccggggcgtggaggtagtcatcgggatacagcgttaattttttcgcaagattgaagccaatgcagcgttgatgtcggtgtacttgaaacgatagccttcttccagtgctcgtcccggtttgacgcgttggctgagggtgagtagatctgctatctcgccgaagcacagccgcagtagctgcggtggtagcgtgaacagcgtaggacggtgcaggattgcaccgagtgcccgaacgaaggcagcgttgatgactggatgtggtgcggtgagattgtaagccccaggctgaccatgctcgatgagccaaatgatcatgttgatgaggtcttcgcgatggatccagctcatccaatgttgcccgttcccaaagcgtccaccaacgccgaaccggaaggccggcagcatttggcccaatgcaccgccgtcgcgctcaagtacgatgccgatccgtatcagactcacctgtgaacccagtgcactgatccgtagtgcttcgttttcccagtcgcggcagagttgtgcagcgaaatcgtttccaggtggtgcggattctttgagaggcgtatccccagattccccgtagtagccgatggcggaagcagagatcaaccgacgcggacgctgttcaacggcaagagtggcaatccagtcatataaccggcgtgtcgtttgtaaccgcgacgcgcggatctcttccttaatgtgtttgttccagcgtccttccaacagagatttcccagccaggttgatgatcgcatcaattggcgtgacgacgttctccaacgtgtttacaagttgcacttgaggtaaacgtgcactatgtcgtgtgggatcgcgactcagcacggtgacctgatggccacccccaatgagcatggcgcatagtggagtgcctatgaaaccagtaccaccagtgataagcaggtgcataaatagaaagtgttctgtagagaaccacagtatgagccggggagagacaggatttaaagtgcctatctttttcggcagtattgcagggtaatcttaaagtgcgtcgtatattccgtttcttggatgaatatacctgttaagcagaccacaggcagggtaatacatagggtgttgagtttggggtcgcctctcatgtcaatatttcattacattatttagggcgtaagaaaaaatccgttattatcgtttctagtgaatatagagatctttggcggatttctaatgtcattctgtagtagatgaacttagttttgtgggtcgcatagatcattcgctgaaatagttctacgacactatcggtaggtatcttttacgcgttgaggaacagcagttatttcatcctgtcttatttaatctgcgatgcattgtgttacatctgatggaaaccgattgcgctcttctgtccgataaatccagttgaagaatgacatccaacgggattggtcacccttatgttggtaacccagtattagcagcgttgtattcgggcacttcgttagaatattccgaaacgccgttatgagagtttttgggcagatggcgtgctaccagcgtttcattccctgagtcgcttgcagcgtattgcaaaagagatgacgcaatgctgatcagcgatcagggggattgatgaaatgatggaaataactacttgggttgagctgtgaatgtggttgatgccggtgctgcgtctcgcaattcgcgccgcaaaatcttgccaacatcggttttagggagtgttgcacggaactcaatgatgcgtggtagcttgtatctggtcaggttggtcgcagcatgcgcctttacttcctcagcggtcagcatgggatcctttttgacaatgactaccttaacgacttcgccggactgctcgtccgggactccaaccgcagcgacttcagccacgcctgggatcattgcgatgacttcttcgatttccttcggatagacgttgaagccagagacaagaatgatttctttcttacggtcgatgatgtacagaaacccttgtttgtccattttgacaatgtccccagtatgcagccaaccgtctgcatctaacacttctgaagtttcttctgggcgttgccagtagcctttcatcacttgtggacctttaatacacagttcgcccatttcgcctataggtaatgcggtgttagtgtcatctttaatacagacatcagtactagggatcggcataccgatcgaaccgttatgttcttgcagattcagcggattgatgcatgcctctggtgatgcctcggtaagtccgtaagcttcaatcagcggaacatgagtaacttgcttccactgttcggcgacggagcgctggatcaccatgccgccacccagggcaatcttcagagaagagaaatcaagtttgtcgaagcccggggtgttaaggagtttattgaacagtgtgttgactccagtgatgacagtgaagcggacgcgttgcaactctttgacgaatgttcgcatgttgcgtggattgctaatcagatggttgcaaccaccgattttcataaagactaagctgttcgcggttaacgcaaaaatgtgatacagcggtagagcagtgagcactgtttcacagccttctttgagactgttgcttgtttggagccactgcgacacctgctgcatattcgcgaccatatttctgtgggtcagcattgcgcctttgggtgtccccgttgtgccgccggtgtattgtagaaaagctaaatcgtcgctggcgatgtggattggaggcatggaatgcttgcttcccagcgcgagtgcttcacggaagcggattgagcgaggcagttggtattccggtactaattttttgatgtgcttgacggcaaaattgatcagtgatcttttggggaaatcgagcaggtcgcctaattcagtcgtaatcacctgtttgattggggtgtcagcaatgatctgctgcacagttgtacagaagttgtccatgaccaccaatacagtgctccctgcgtcaaccagttggtgcttgagttcgcgcgctgtgtagagggggttgacattgacaacagttaacccggcgcatagcgcgccgaaggtcgctactggatattgcaaacagttgagcatcatcagtgcgattcggtcgccctttttgagtttcaacacattgagcagatagctggcgaattgttttgttaatagatcgacttcgccgtaggtaagtgttttcccgaaattggtataggcgggacaatgacgatatttgatgactgatgtatcgaagacatcagcgatagtacggaaagcgtcagtatcaatctctgttgagattcccgatggatagtgttgcagccaaggacgtgtttgactcattgatcctccagagaatccttagtgtgtctgttcgcattcatcgtgaatgcgtaggctgaggcgcagcagcaggatactttttgtattagtaaaagtgaagggtattggatgtgtcatcccaatcgtgattggggcaataaggcgattggctgatgaaatagctattttagagttaaacggcaacattatagatgacgatgtcaggcatgttggtatgtgttgcttgttccgatggtgtggtatccaattgatagggataggaaatgtaatctttcattttgaatttctctgccacatcactgattgaaaagtgattgctcatggcaatcttttttttatgtgggtgcgtttttttattattgatttataggaaatcttttaggatctttaagcgtcgttggtaggtgtctttttgcgaccattttttcttacattttttgctattccataaaaagaatcggtgaataggttcgatcattttttatgccacgtgatcgatatgagaattgtcatcgtggttattattagtatttcaattaaagaaccatatgcagagataacaggctgaatctcttttttcaatggaaagtatgcagatgatgactatgttgttgcagaaagtgtatttagatcgaaatacatttatttattatgtttcacatagatcaagcgtcgttacctaattgatgctcaaagcttggatgaattgctattttctgagaattaagctgatgagatttttatcatggcagcgagtatgcattggaatactatttctaggcgatcgtatccagtcgatacatgatgtttctctttttgagggtgatacgtgcgttaatcattgtgttaatccgttggtgtttgaggtcattccgacactgttgcatgtcatagtactcgctcgtatgcagagtgtttttatagtactgcacccattggagtggctgagcatgagatttctcgttcgctcttgcttgttttagacgttgatactagtgctgatcggtttctgtggtgctgtgtttccaaaggatgcagaaacaggcagattttcggcatgtatacgctgttgttgaaggtgtgttcttgattgttccgagctgctgctctctatacgatgcatgtattcaacgtgtcgatcagtgaatgcacgttcaaaatcaatatgcttatctttaagtcatgtgataagacagcgcgctatttgagccgaatattgacattatttggatattcttgagtcggcttgttcgaccaggggtgctataggtgctgatacttcacggttgacaatgttgactggatattgcgtctttctagtgaggtccccagggcagagggtattgccggataacaggtgtgttgggtggagacctccaaagagtgcttgctactagagcgattgccgccaccgtccgctttgtcggtatttgcgaacgtcttgcttcagacaaggaggcaggcacggaaaggtggggcgtcgctgttgcaatgttgatttccggattaagcaggcttgccagtgttgatcagatggcgcagcacatactggagcagtccaccatgtgtgaagtagtccacttccttcggggtgagcagtaggaccttgacttgaaactgtttgatgctgccatcggattgttttgcactcacggtggcatgtttgctgatagtgccctccaaaccggtcacatcgaacatttccgatccatccagacccagtgtctgtgcgttctggccgtcgagaaattgcagtggcagtacgcccatgccgacgaggttggagcggtggatacgctcgaaactctcggcaatgacggctttaatcccaaggagtttggttcccttggctgcccagtcgcgtgaggagccagtgccgtactcctttccagcgattaccaccaacgggacgccgtctgtgttgtacttcattgcggcgtcatagatcgacattttctccggtggcccaccggctttggggcgataccatgtgttcccaccttcttcgccgttgagcatgaggtttttgaggcggatgttggcgaaggtgccgcgtaccatgacatcgtcatgcccacgacggctgccgtagctgttgaagtcggcaggttgtacgccatgtgcttgcaggaagcgtccggcgggagaatcctgtttgatgttgccggctggggagatgtggtcggtggtgatcgaatcagcaaacaggccaagcacgcgcgcgccgcgaacgtccttgacaggctcagtttgcatcgtcatcccatcaaagtatgggggatttttgatgtaagttgagtgggtgtcccaggcgtacaacgctccgtttggtgaggcgatggtgttccagcgggtgtcacctttaaacacgtcggcgtagttctgttggaacatctccggaccgattgtggcggcgatggcatctccaatctgtttgttgcttggccaaatgtcgcgcaggtaaaccggctgtccgtcgttgccattgcccaatggctcggaggtcagatcactattgaccgtgcctgcgatggcataggcaacgaccagtgctggactggcgagatagttcattttgacttctggatggatgcgcccttcaaagttacggtttcccgacagtaccgcggcggctaccaagtcgcccttggcgatgcctgcgctcacttctgggggcagtggcccagaattcccgatgcaggtagtgcagccgtagccaaccacgtagaacccgagtgtctccagatcgttgagcaggccggctttctccaggtagtccgtgacaacacgcgaaccagggccaagcgaggttttgacccagggttggcgttgcagtcccttggcaacggcattgcgtgccagcaggccagcgccgaacatcaccgccggattagaggtgttggtgcaggaagtgatggctgcgatgacgacggcaccatccttgagttgtagtgtttgtccgttgatgtcgaggtcaacttgtcccttgatggggggtgtgtcgtgatcgttggctttggtggtgcgatgtgcggtcagtgcgcgaacgtgttcgcggtagttgttttgcacgtcttgcagtagcacacggtcttggggacgtttgggaccggccaacgatggtttgatgtcgtccatgttcagttccagtgtggtgctgtaactgggaggcggggtgttgggcgcataccacagcccctgtgcttttgcgtaggcttggaccagtgcgatttgcgattcgctgcgtcctgacaggcgtaggtaattcaatgattctgtgtcgatcgggaagatgccgcaggtggcaccatattccggtgccatgtttccgatggtggcgcgatcagccagtggcagatgtgctaggccatcaccgtagaactcaacgaatttgccgaccacaccgtgtttccgcagcatctgggtgacagtcagcaccaaatcggtggctgtggcgccctcggggagtgtgccagtgagtttgaagccgaccacctgggggatcagcatcgaagagggctgacccagcattgccgcttcggcttcgataccgccgacgccccagccgagtacgccgatcccgttaatcatcgtggtatggctgtcggtaccgaacacggtgtctggataggcccaggtggcgccctctttttcggtcgtcatgaccacgcgagccaggtgttctaagttgacttggtggacgatgccggtattcggcggtaccaccttgaagttgttgaatgctttttggccccagcgtaggaagccgtaacgttctttgttgcgttggaactcaatgttgccgttgcgttctaatgcctccggtttgccaaaaacgtcaacctgtacggagtggtcaatgacaagttctgatgggatgtgtgggttgatctgctctgcagtgccgccgagtctgatggctgcgtcacgcatggctgccaagtcgactacgcagggaactccggtgaagtcctgtagcaccacacgggctggcatgaatgcaatttcggtgtccggctcggctttgggattccatttagccactgcctcaatatgcgcggtgctgacggtgacgccgccgtcttcatgccggagcagattctccagcaagatcttcattgagtagggaaggtgcgatatgtcgaagtgctcacccagtttcgtaaggctgtaatagtggtaagactggttcccgacgtgtaattgacgatgggtggagaacgaatcgcgcatagtgggtgattccttacgtttagatggcttgcagtggcagtgccgcttcacattatcggcttacagtgcccctgatgggcggttgtagtgctttaggtatacctcaagagtacaccttgggatgtgtcactgatgtcactgcgaatgtttatgctcacgtatgactcggaatacttagatgtctgcatgcattctggtatgtcaaaaaaaatatgtataatgaccgcatactcatagaggcaatcatcaatggatgcgactgttgccgaacgtgggcaaattacgctgcctaagagagtgcgcgatgcactgggtttgaccaagggcaccgtgttgaaggtcgaattggaggggggacgtatcatcctacgtaagagtgtggatgatgcaatcgcgcgtgcccgcggcagatttatcctggacgatttcggttgcagtgccatcgcgacgaagacggacaagcaatgagacggtgattgcagtcgatttccccgttctggttgaattgctcactgatcggccacaggccgatgcagttgaggctgcgttgcgccaatgtctagtcagtggccgggttgtggtgtgtgatgtggtgttggccgagatgagtgctgtattacgcggcggcgctgaggtgctgggagtgcttgaggagatgggggtacacttcgatccattagaagctaaatcggcgttgcgtgctggcgagatgtaccgccgctatcgtcaacgtaatgccaccgaaagtgacatgaaatattttctagttggcgctcatgcgttattgcagtgcgacggcctgatgacctggaacgatgcgttttatcgtgattattttaaaggtatgaaactcatcgtgccgggcgcatgagtgcctccatccatacgttgtccatcctaaattatttatgcggagagttacccatgttggaagcctatcgccaccacgttgctgagcgcgctgcgcttggcattccaccattgccgctgagtgcgcagcagacggcagatgtcattgaattgtttaaagccccaccagcgggtgaagaagattttctcctggatctcatcacctaccgtgtgccaggcggcgtagatgatgcggctaaagtcaaagcctcctatttggccgcggttgcctttggcacagaagtcacgccgttgctcacgccacagcgcgccaccgaattattagcgacgatgctcgggggctataacatccaaccgttgattgatttgcttgatcatgccgcattgggtcaggttgcggccgaagggttgaagcacaccttactggtgtttgatgcgttccatgacgtgcaggagaaagcagagcagggcaatggcaacgcacgcgcagtccttgaaagctgggcggcggctgagtggttcaccagcaagccggaagtgccgcattgcctgaccgtcaccgtgttcaaagtccccggtgaaaccaataccgatgatttgtcgccggcaccggatgcgacaacccggccggatattccgatgcatgcgttagcgatgctgaagaacacgcgtgagggagcaccgtttgtacccgaagaagatggcaaacggggtccaattcaagagatgttgtcgttgaaggagaaagggcatctcgttgcctatgtcggtgatgttgtcggtacaggctccagccggaagtccgcgactaactcggtactgtggtggacgggcaaggacattccatacattcctaacaaacgtttcggaggtgtgtgtttaggctcgaagatcgccccgattttctacaacacgatggaagatgctggtgcgctgccgatcgagcttgatgtatcgaagatggaacatggcgacgtgattgagttgtatccgtatgaagggaaagcacggaagaacggcgcagtgattgctgaattttcgttgaaatcggacgtgttgttggatgaggtgcgcgctggtggtcgtatcccgctcatcattggccgtggcctgacctccaaggcgcgtgaggccttaaagctggaacccacttccctattccgtttgcccgtcaatccaccggaaactggtcgcggattttcgttggcgcagaagatcgtgggccgtgcttgtggcctccccgaagtgaatggcaagcagcagggcatgcgcccggggacatactgcgaaccgaaaatgacatcagtcggttcacaggatacgaccggtcccatgacgcgtgacgaattgaaagatttggcctgcctgggattttccgctgacttggtgatgcagtcgttctgccacacggcggcctacccgaaaccggtggatgtaaaaactcaccacaccttgccggaattcatttccacccgcggcggcgtctccctgcgtcccggtgatggggtgattcatagttggctcaatcgcatgctgttgcctgataccgtcggtactggcggtgattcgcatacccgtttcccgattggactttcgtttcccgccggttctggcctggttgctttcgctgcggcgaccggggtgatgccgttggatatgcccgaatccgtcttggtgcgcttcaaaggtcacatgcaaccgggggtgacgctacgtgatctggtgaatgcgattccgctgtacgccatcaaacaaggcttgttgactgttgccaaacagggcaagaaaaacattttctctggtcggattctcgaaattgaagggctgcccaatttgaaggtagaacaggcattcgagttgtctgatgcttcggcggaacgttcagcggcgggctgcaccgtccgtttgaataaagagccgatcattgagtatctcaatagcaatatcaccctgttgaagtggatgattgccgaaggctatgccgatgcccgttccttgacgcgccggattaagaagatggaagcatggctggctgatccgcaactgatcgaaccggataccgacgttgagtacgctgcggtcattgagatcgacctggctgatattcatgaacctattgtggcctgcccgaatgacccagatgacgtgaaaaccttgtctgaagttgcgggcgcgaaaattgacgaggtctttatcggttcatgcatgaccaatattggccacttccgcgctgcggccaagctattggaaggcaaacgtgatatcccaacccggctatgggtggctcccccgaccaaaatggacgcatcggagctgaccaaggaaggctactatggcacctttggcaatgctggggcgcgtatggagatgccaggctgttccctgtgcatgggcaatcaagcgcaggcgcgtgagggggcgacggtattttctacctccacccgtaacttccctaatcgcttgggccgtaataccaacgtgtatctgggttcggcagaattagcggccatctgctcccgtttggggaaaattccgaccaaggatgagtacatggcagacattggtgtgatcgatactcaacgtacggagatataccgttacatgaactttgatcagatccaggagtatctggatgtggatcacactgcggtcgcgtgatcgtcaataggacgtggtgtcatcgcccccggccaggagtttgccagctccggctcgggggcttgatgaggtaagcagacttgttttggtcgcagctcatcaacagccacgacaacctaggaggcatcggtgatagcagtgacctcatgcagtgcgacgtattcctctgcatctgatgggcttatcgcgttgctttatggtgactcctggtcagcgtgatcgccgagtgcatcacacatcaacattcagttgtctgcgtacctgttgttcctctgcggggtttgttgctggttatgttcgcgctgcgcgtaaaacttgatctacgtgtgcctgggtgggtatagtcgccgcaccttacacatgcagcgaaacgatgcggtgtgaagggccgggtagctcagttggtagagcaggggactgaaaatccccgtgtcgggggttcgattccctccccggccaccaaaattcaacgcccaactgttctcagttgggcgttttcatttccagggtccgcgacacaacgcgaacgacatggcatctcggacagatcgcctcacaatagcggcagcgcctatgagcacgctcccagtgttgagaactagatcgtgcagccccttgatcgcctggtctgtcgcatcgtgtgcctcaggtgcggactggagagggggtgccagagagacgctcacagacgctcacgcaaacaagaagagccagcactgctgcggtatcagaggccccatttccaagccgataccgagttctctacgtgtactgccaccgtgccgtgttgcgttgctgaattgcctttcttacgcgtgcgatggcggacggtatgcgcatctattcctcctgcatcacaccgtgcttcttgtcgatctgtactttcggcaaatgcggtgttgccccataccttccattgcgcgccaaccgggaacatatgcactcatcagtgccttgaacatgcgcccgtgggttgcgaagcgtaggtgaagcagctcatggacgatgacgtagtcctgaaagcgctgctcttggtcgaggaggtcgctcgctaacgtgatggtgcccgttgaagagcacgatccccattttctgtgcatgtcctggacccgaacggcacgaggattcaccttgagcttgaccgcccaggccagcacacgacgtttcaagtcttgtgccggatattgcgacgatttcattcgcggccctccgccaacaacagccgtacaacgaggtcgacgacacgcgcccgctcgtcctgcgcaagagcaaggaggggcgtgtacagcgaggcacgcagcttccgttgttcgtcggcgttcatcaaggcgttgcggtagcgtcccagcaacgcttcggcatccttggccagcgtcatggggtcgatgcccactgctttgatggctgcgtcttcgcgcagcacccaggcaatggcgaaggcgcgaggtgacaaaccactgttgcgtgctgcctgcattgccgcgtctttctcggcagccagtgctgcgagctggtccatcgcggccagaccagtcgtcttccgctcctccagattcttgatgatgcgattggcgcgatccttcagtggctgtagcaccggggccgtggcggggttttcgtcaatttcgcgctgcagatcgcgtaccaggttgtacaccttgccctcctcggacccaacttcgtcacgcagtgaggtgagtgttgccatgtcgaaggtcacactcttggtcaggcgtccaaggccgtgttgttcggcgtttttctcaatcaggcggcgtgttttgtaggccaagtcagctacaaatccaacctttgcggcgtaggcgttacgcacagtggcatacagctgagtgagctgcttataggtcgtggtgtggtcacgtagcgcgggatcgggcgaaagaatttcccacagtgcctcgatctccttgtagttttcgaagaagattttacgcgcctcgggcgtcaagaagcggccgaacaccaggcgctccaactgctcgtccggcgtgccgccagcgtctggctttaggtagtcctgcttggcctgtgcaatgcgcttcaggaagtcctgcagcagcatgtcgagatcctcaatcgcaccgctgacgtcgctggagtcgaactgcagcgctttcttaaggacgcgcagcacgccgacaaagtcgaccaccaggccgacacgcttctgcatcccgttggcatccacgtaaggccggttcgctcgcgcaatcgactgcagcaaaatgtggtcgcgcatcggcttatccaggtacaagcagtacagcaatggcgcatcgtagcccgtgagcagcttgtcggtgacaatcaggatcttcgggtcttcggtaggtttcttgaagtctttgtgcacttgcttctcggcctccttggagagctgcaacccggccaccaatggacgatccaccacgtcagcggcgttctcggtgtagaccgctgcggtccactcgggcggtagcagtgtgtccagtgccttcttgtacttggcgcaggcctcgcggttcaccgcaaccacgaaggccttgtagcccagcggcagcacgttctccttgaagtgtgccgcgatgaaagccgacaccttttcgatgcggtcatctgccgtcaggaaggtgcgcagccctaccacgcggtccagtaccttgttcaattcctcaacatcggtcacgccttcgctgtcggccagcgcaaaaaactccttgtccagccgttcggcaggcaccgtcatctcactcggcgccatcatgtatttgatcggtagcgtggtctggtcggcgatgctctcagcaatggagtacttgtccaggtaacccagcgcatcctgcgtgccgaaggtcttgaacgtgctttcgccttgtgaggtgtgcgcgataggcgtgccggtgaagccgatgatcgtggccttgggaacagccgccatcaggtagatgccgaggtccttggctaccgagcggtgcgcctcatcaataaacacgtacacgttgtcgcgcaggcagctgtctttgcggacagcctcgaacttgtggatcattgagatgatcaggccgcgaacgtcagcatctcacagggactgcagttcggccttattgttggcccgtttgaccgcgatgtcttgctgctgcatttcgcccagcaggcattccacccatcctttcaactggccttccagctccgtgcggtctaccacgagaatcaccgttgcattggcgaagcgtgccttgttttccaagatcaaccgtgcagcggtcagcagtgtgaaggtcttgcccgagccctgggtgtgccagattaggccgcgtgtcttggcagggtctgcgcagcgttccaggatcacgtcgatggcgcgccgctggtgctggcgcagcaccgacttgcgcgtctcgccgtcctctacgtagaacaaaatccagtgctgcaacgtgcgcaggaattcggtgggttcgaagaaggtctgtactgcgaagcggtaggtctcttctggtgcctgtttccagcgtgccatagagcgccggttcgcattccaggtgacgccgtaccagtagtcgagtaggtgcgtgacgttgaatagctgggttgtcgccagcagctcgggtgtttccagcgtgtagcgacgcagttgcttgatggcacgctcaatggcgtcgccgtccttcgggtttttgtgttcgacgatcaccactggtacgccgttgatgaggaacatgacatcggcgcggttgcccttgcgtgcgggtggtttgatcttccattcccaggtcacatgaaacaggttgtccgctacgtgtgtgaagtcgatgagtgtcaccggtcggtggcgcttttcggagtcgtcgtaccactgacgttcgccgcgcagccaggccagcaactcaccgttgccttcaatggtggccggcagtgcgtccaaggtttccaccacggagcgcacgatgtcggcagacatccaggggttgaacgctgcgagtttggcttccaacacgtcacggaagaaggtaccggcttcgccgccccgcttggtgcgcgcatcctccggcgtgattgatgtccagccgatctccaccgcgtgtttcaccatggggaactgcacggtcccgacttcgctgattttgagtgtgttcatgcggtggtctcctcgtgttgcgtcgaggctggggacagtgccgacagatccagatccgatacagaaatttccccggtcatcagtttgtggagcagggatttgaacatgtcctcaaggacatggcgcttgcgacggtgcaggtcgatcttgcggtcgatggcgtcaatgattgagacaatctcgtcctgctcgacgtgcgagggaggtgttgcgaatagaaggtcacgaaccatctccaaattgaggttctgttgttgcccgccgtgggcgagtgatcgaatatcctcgtagcgccaagtaagaaaatgatagaggtatcgtgtatgaactaggttattgatcggaaccatagccgcgcatgcctgattgcatgcggcttcgataccaagaatcgcgactttgcctcgagtaacgccttggccgtacatagccatcaaaagggttcccttcggtagcaacttggccgcagagtcttgaagtcctttgggtgttatgtgctcctctgtctccgtaatctgacagtacgccacctcggtagttttgatccaagggatgctgccaccagtccaataggcagggttgccacgagatggggtgccaccagatacaaccgagaagtgtgccgcgatgggttctaacccccagctttccggcagcagcccgatctcggtgtccttctgtgcttcgccgcgcaggccgcgtgtgaagatgctgctaagcgctgagcgcttcagtgccatgaatgtttgagagaggtgctgttcgttccgataggcggtgcgtacgccaatgataaggtgtgcgagggactgttgttcctgcagaggatgtgcaggcacttcgattcggaggtactcacgccagtccagattgcgaatacccgttgttgcgcgttggagggtttcagtagctccatcaaggtagagagcgtgcaaatagagggcgacgtagccagggtcgaatagcgatcgatctctgatgcgaatcgttgttgtgaagttgctggagaagtacgtgtgatcgtcgaagggtacgaagagtgcggccctaccgacgggctgctttgggccgccaccagagcgttcgatgatgatgtccccgggttgaagttgccgtgaggcaaagtgtcgatcctcgacctccagctccaccacatcaccgaagtcgagcagcccatcgcctgcgaagttcgtgctacgtaggactctggctgacttcaagggtccacgtgctcctttccaaagaccgctgatcagctcgaagttcgacgtgtcgttaagcggcacgcttttcatgacgcgtctccctgcgaagcaatgcggcaaagcagcggctcaagctcatgccagaggttatctgctttctctgtcaggtcatttgcaagacgaaccaagtcaccgatgcttcgatgatcggcgtcctctgactgcctcacccatcaccccggactcaggttgtagtctgcctcttcggcttgttgctgggtgataacccctagctccccggcgacgggttcgcccttgaggtacagcgccgccaaagaccgcacgtcctcctcaggcaggtagttcttgggtttgccctttttgtatcggcggctagcgttgagcaggacgatcttgtcctttcgcgccgccggtttgcgtttgttgagcactacgattacgcccgctgctgtggtgttgtagaacaagttctcaggcagcaggatgacgccgtcgatcaggtcttgatccacgaatcatttgcgaatgctgcgctccttgtcttcgttcttggagccggagccgcgcgtcaccgcgccggtgtcgagtaccaccgctgcgcggccgtggtcgtgcaggcacgccaaggtgtgctgcaaccatgcccagtctaccttgccgctggtgatgccgcctgccgtgcggaagcggtcaaaaggtcgttggcgaataggtccgccgtaaagggttggttccacatcgggttggccaccacgatgtcatgactgcggattttgccgctggctgcgcgaaactttgggttgatcatggtgtcgccgcgggcgagttcgacctccatatcgtggatgattgcgttcatttgcgcgatggcgtagttgtctgcctggagttcctggccagacagcttcactgggatgcggctggtggggtcaagttcgtgggcgacgatctgcagtttgatgagtaacccgcctgagccgcacgcatagtcgtgacaggtgtcgcctggcttggggcgcaggatgtgtgccattaaaaagcccacctcggttggggtgaagaactcgccggcgctctgtcccgaaccttcggcgaacttgcgtagtaggtatgcgtaggcgcggccgaggaaatcaggttgtacgtcggcgagtccgaggcggtagcgtgggtcggagaacgtttcgaccacgccgcgcagcttggccggattgatgtcgcgctcgccgttacgttcgacggcgaagtccacgatgtcgattacaccgaagaatgtcggattctgtttgaccactgcacggacggccttagtgaggtgctcgccgatgtcgcgtggcgcggttggacggtcgtcttcatccagcggccagttgaacgactcacgcccgctgatcaccgtccaccgagcctgcgggggcaggtagaaccgcagcagcgagtggtccgattcggcaatttccagggcggtggcacaatcgccgtattcctcggcgagccgtgtgatttcgtcgtcgaaaacatcggacagccgcttcaggaagagcaagggcagcaggtaatccttgagcttggctgcgtccttctcgccgcggatcgaacaggcggcatcccacagcatctgctccatcggcttggttgtgggcgtggccgtcgccgtcgccgctcaccccgtgcgccgccgcgtcacttgcgcggcggcttcggttggcggggggctttcggtaccttggacccccgcttcctgcgctagagcaaggatggtttgctgtgctgcatgttgaggtgtgttgccgccactttcccagcggttgaccgtggcgaagcagacgcctaggcgcttggcaagttgttcctgggtgaggttcaaggcggcgcgcgtagcgcggaggatcgcagcgaaatctgtctgatatgtgatgtttgtgatgtttgatctatgtgtcaaacagtgtgttgcgcggcaggccagggtggtgggcgagcttggaaggggcaggccgatgagcaggagccgatgcgatgtggctggggtgtctcacagggtcgatgtgcatggatgtggtcgatctatgcggtgccgacgaaaccagtgatgagacttgcctgatggatggaaacgagaagatctggggtgtccacgtcatgatatacgccgatgttgacgcgctttaccgggttgcctgtgtctgcgcggtgaagaggagcggcggcgatagaccacgttgatgtgaaggttggctacggaatcgattcatccgctgattaaggtggctgggccgcaagtggcgggttccagccaagggcaacctgttcctgaatgtcaggggctacaccttggaggtttacaagaccaaaacgggacgctagggagatcgcatcggcagccgatgtggtcaccggacctatgcggctctggacgaggcgaagctagtgcggtttgacgacgtttgggcgatgccccaggaggatgaccggcgataggttgctggctgatggggcgacgggagccattgcggctgagttgtgagggctgctgttctctgaggtgcagaccctatcgcctgttgagtgagtgaaaccaatgtggaggagtgccctatcaggttgtgactgacgtttggggacgcgcagggcaatccaaaggcacgctttggcgctgccttaaatgtcatgcgtgtttggtaagtaggtcgtggattttcataccgcagtactggagtgcaatcaggtgactctcttcctggcctttatacggtgctggagctggggagtactcggttctagaactgtaacgttcattaaataaattctctgccatgaatcattcgaaagttattgaatgaatgacggatagagcaagatcagcgggccaatgattgtcgcggcaaggggcgttggatggcgattgtggtgggtattgctgtgattgacttgatggttgctgtggtgtggtggcgtacccagagggttattccggtgtagcgcgtgacggcaatatcgccacgttccagtgcagcaacgccgctgttgcaagggacgggctatgtgaccgcgagacggcaagcgacggtttcggcgcaggtcaccggcgttttggttcagttactcatcgaagagggtgacacggtcaaggccgggcaagtgattgcgcgtttggatgatagtgcgctgcgtactgaattcaacacgcctgtggtcagtgtcgaagcagccgcggcgtaggtggggcagttccaggcgcaattggtgcaggctggggtggatgcgcgccgcgccagcgagttgtcccgtgtcggtgtgctcagtaagtaggcagcggagcagtcgcgtaccgcagtgaccacgcttaaagcgcagcttgaagcaagtcgcaaggcggccgatgtggcgcgggcgcaggttgctcaggtcaagatgaacttgggtttcacggtggtacgtgtacctttggccggtgtggtgattgtgaaggcggcgcaggtgggcgagatcgtttcgccgttatctgccggcagtggttttatccgctctggcataggcaccattttggatatggatttgctagaaattgatgttgacgtgaatgaggtttacatctgtcatgtgaaggtcaatatgcctattgagcatgcctattgaggtggtgttgacggcttatcctgactggcgcatcccggggcatgtcgttgccattgtgcccacggaggataaaggaaaggccgtggtgaaggtgcgtattgcgctggagcagaaggatccacgtataacctcaagcatggggacgcgtgtttcttttttgaaagctaaatttgcagtggccagtgaggcagtgtcgccaagtggtgtgttgttgccgtcatctacagtggtgcagggtggtcagcaccgggttgtttaccgtgtgcagtgatggtagtgccgaagttggttggcagtcagatgctgacattgatgggctgtgtgtcggtgacagtgtcgtcactagggtgattgtcaggttgcttacgtcaaggggttcagtcatatgtgtattcggaatgtaaagatgccggggtgtggggtgttggttgctgacagtgcagggaacgcttgctgtggatgctgggaaggggctgtgatgtgaattggataggcattgttcagaagacgatggaacatcggctatccttgcgtactggaattttcaggagtttctaacctatgcgccccaagattgtggctgggaattggaagttgcatggtagccacgcgtttgcacaggcattggttgcgcaggtcgctgctggtttgccgcttcttggagtcagtgtgattatcttgcctccattgctgtatctgagtgatttggcgcagcgcttcaaaggggaaggtttggcgtttggtgcgcagaacgtcagtcaccatgataaaggtgcttacactggggaagtttcggcggcgatggtggctgatgtcggtgctcattacactttggttgggcattctgaacgtcgggagtatcaccatgaggacagtgagttggtggcgcgtaaatttgctgctgctctgagtgctggcttgcgaccaattctatgtgttggggagagtttgccacagcgtgaggctggacaggcagaggttgccattgcgatgcagcttgcgcctgtgttggctctggttggcccgcagggtgttgcccgtggcttgattgcctatgagccggtttgggcgattggtactggccgtcatgcggatccgagccaagtccaagcgatgcacgcttttattcgtggtgaaattgcgaggcaagatgctagaatcggcgattctctgttgattctatacggaggcggcatcaagccttgcaatgctgctgagttgttttcccagcaggatgtcgatggtgggttgattggtggtgcttcgttggttgctgatgatttcttggctatcgctcgtgcgacggtttagggctgatctgcaacgttcctttactcggaggctgattcgagatgttgttgcttaatgtgatctatgttcttgttgccatcgctatgattgtgttgattttgatgcagcgtggtacgggtgcggcggcagggtctggctttggtgctggcgcatcgggtaccgtattcggttcgcgtggtgcttccaatttcctctctaaatcgacgaagtggttagctgtagtgttctttggtatcagtctattcatggcttggtatgccagtcgcggtcaccatgcggttgcgcagcagaatagtttgatgacggaggtccctgcagctcctgctgctggcgctgaccaagcggcatccccagtgcttcaagttcctgcggtgccagcgtccactaatacaccggctggtgataaggaaaaagcttccgatcactcgcaaaaacggtgaaggtggttagaatacgctgcgtttgtaagggtggtcacgtaacgtaagcccaggtggcggaattggtagacgcactaccttgaggtggtagcgacgtaagtcgtaggggttcgagtcccctcttgggcaccatatttgcttgctggtttttgcgtgtggcgatcatcgccagcgtagaatcctgttatataccctcccccatgcatgtctatgtctccctattttatgggggcatcggttagaaagagaatccctgtgctggccgaatatttgccgattctgatttttctggttgtggctaccggtattggtcttgcattgatattgattggcaggtttctcggtccgcatcgccctgattccgaaaagctgtcctcatatgagtgtgggttttcggctttcgaagacgcacggatgaagttcgatgtgcgttattacttgattgcgattcaattcattgtcttcgacttagaaatcatcttcatcgtgccttggactcaggtgttcatggatattggcgcgcgttcgcttgtcacgatggggctatttgtcgggatgctgtttcttggttttatatacgtatggaagaagggagcgctggaatgggagtaattcaggctattgatcgtctgatgactaatccgatccctgatggtcaggtggatgacattctacggccgcagggggagagtccactgttgcaaaagggctacgtgacaaccagtgtcgatgctttgttgaactgggcgcgtaccggttcgatgtggccaatgacctttggtttggcctgctgtgccgttgaaatgatgcacgctggtgctgcccgcctggatttggaccgttacggaatagtatttcgtccttcgccgcgtcagtctgacgtgatgatcgtggcgggtactcttgttaacaaaatggctccggcgttgcgcaaggtctacgatcagatgcctgacccgaagtgggtgatctctatgggtagttgcgctaatggtggcggttactatcactattcttattcagtagtgcgtggttgtgatcgcatcgtgcccgtggatgtctatgttcccggttgtccgccgactgccgaagcgttggtctacggcattttgcagttgcagaaaaagatctggcgaacccagaccaacgcaggttgatctgttgttttctatctactgaatagccaactattgagcagccaagtccacatggcagaacaaactctttctttcgttgattgtctaacgtcgcgctttccaacggttcgggtctccgtggcccagccgcgtggtgagattactctggatgtgcccgcggttgagtggtgcgccgtttgcagagcgttgcgtgacgagttcgactttgaacagttatccgatctttgcggggtggactatcttggctatggcaatacggagtgggacaccactgatgtatccgcgcaggggttcagccgtggcgttgctggtaaggcggttggccgctttgcttggggtgagtttccaagtgcaggcagcaatgatggtactcagccgtgggatgttccgcaggagcgctttgcagtgctcgcgcacctcatttcttatcggcataaccggcgtttgcgggtgcgttgttttgcttccaatgatgcgttaccgatcgtcgcttcgctgacggacgtatggcctggggtgaattggttcgagcgtgaggcatttgatttgttcggtattgtgttcgaggggcaccctgatttgcgtcgcatcctgacggactatggattcattggtcatccctttcgtaaggattttccgctgaccggcaacgttgaggtgcgttacgacgaggaaaagaagcgtgttgtgtatgtcccggtcacctcggttgagccgcgtgtcagtgttccgcgggtgattcgtgatgatgcgcgctttggggctgcagcgggcgaatctactcattcggagacggttaagtgaatcagattcgccaggcgcctgcgacttctgccagcaatgctactgaatccaagcaggagattcgtaattacacgatgaacttcggtccacagcatcctgccgcgcatggggtgttgcgtctgattcttgaaatggacggtgagacagtggttcgtgcggatccgcatatcggtctgctgcatcgcgggactgagaaacttgctgagtccaagccgtttaatcaatccatcggttacatggatcgcttggactatgtgtcgatgatgtgcaatgagcacgcttacgtacgcgccattgagactttgattggcatccaagcgccggagcgggcgcagtacattcgtacgatgttcgatgagatcacgcgtattctgaatcatttgatgtggctgggttccaatgcgttggaccttggcgcaatggctgtgatgttgtatgcgtttcgcgagcgtgaggagctgatggatgtgtatgaggcgatcagcggcgcacgcatgcacgcagcctactatcgtccaggtggtgtgtatcgtgatctgccggatacgatgcccaagtacaagcaatcacgttggcacaagggcaaggcgctgaagcgtctgaacgctgctcgcgaaggttcaatgctcgattttctggagcacttcgctgacacgttcccgcagcgtatcgacgagtatgagacgttacttactgacaaccgtatctggaagcaacgcaccgttggtgtgggtgtgattgagccggatgtggccaaggcctggggaatgacaggtgtcatgttgcgtggctcgggtgttgcttgggatctgcgcaagaagcagccttacgctaaatatgatgcggtcgattttgatattccgcttggcacgtgtggtgattgctatgatcgttatttgtgccgtgtggctgagatgcgtgagtcgaatcgcatcatcaaacagtgtgtgcagtggttgaaggtgaatcccggtcaggtgatggttgaaaacttcaaagttgctccgcccaagcgtgagagcatgaaggacgacatggaggcattaattcaccactttaaattgttcagcgaaggttattgtgttcctgccggtgaaacttacagtgcggtcgaggcgccgaaaggtgagtttggttgttacttgatctccgatggtgcgaataagccgtttcgtgtgcatttgcgtgctccaggatttgcgcacttgtcctcaatggatgccgtggtgcgtggctatatgttggccgatgtggtggccatgattggtacatatgatttagtgtttggtgaggtcgaccgatgaaggcgacaaagagttttgaactggtgcgtgatgtggatccccaggtggtattgggtgaccgcacgcgggctcacattgatcattggcttgccaagtttccagcggatcagaagcgatcagccctgttgcaggggctgtatgccgcgcaggagcaaaatcagggttggttgacggatgagctcatcgccgctgtggccaaatatctggatattccgtccgtatgggcttatgaggttgctactttctactcgatgtttgagacgcggaaggttggccgtcataatgttgctttctgcaccaatgtcagttgttggctcaacggtgctgaggatttggtgagctatgcggaggaaaaactaggttgcaagcttggccagtccactgctgacggccgtgtttacctcaagtgtgaggaagaatgccttgctgcttgtgctggtgctccgatgatggtgattaacggtcattatcatgagcgtctgaccaaggagaaggttgaccagttgttagacggcttggagtaacgtcatgggacatcctcacgtatccaagggaccggttggcccgacacctcagccgcaccaagtgatctataccacgttgcattatgaaattccgtggtcgtatgaaagctatttgaagaccggcggctacactgcgttacgcaagatttttgaggaaaagatccctccggagcaggtcatagacatggtcaagcagtcgaatctgcggggccgtggtggtgcaggttttccgacgggtctcaaatggtccttcatgccgaagggcaccatgcaaaaatatattctgtgtaactcggacgagtccgaaccggggacctgtaaagatcgtgacatcctgcgctataacccgcattccgtggtggaggggatggcgattgcatgttatgccactggttccactgtggcttacaactatttgcgtggggagttccaccacgagccgttcgaacattttgaacaggcgctggccgatgcttacacacatggttggcttggtaagaacgttttgggaagtggcgtagatatcgatatctacgcggtgcttggtgctggtgcctacatctgtggtgaagagactgcgctcatggagtctctggaaggcaagaaggggcagcctcgctacaagcccccctttcctgccaattttggcttgtacggcaagccatcaacgatcaacaacactgagacgtatgccgcagtgccagccattattcgcaatggtccggagtggtttttgtctctgagcaagactaaaaacggtggctctaagatcttctcggtctcggggtgcgtgcagcaagggggtaacttcgaggtacccttaggcaccacctttgatgaattgctggagatggccggtggcctgcggccaggtcgcgctctgaaagctgcaattccggggggtgtatccatgccggtattgaaagcggagcagttgcatggccttcagatggactacgacacactgcgtgtgctgggtagcggtttaggctcgggggggattgtggtgcttgatgacagtgtctgttgtgtccgttttgcctgccgcatctcgcagttttttcataaggaatcgtgtggccagtgtactccgtgccgtgaggggaccggttggatgcaccgcgttttggagcgtatcgttgctggccaggccacgatggaggatctgcaccagcttaaagtagtggcggggcagattgaggggcataccatttgtgcgtttggtgaagctgcagcttggccaatccaagggttcctgcgccaattctgggatgaatttgagtactacattgttcatggtcggtcgattgtggatgacaaggcgagagtggctgcatgagtaaccaatctgtgaatcctgaggtgcggcctgatcgtgtcaccattgaaattgatggccagaatttagttgtaccgaaaggttcaatgattattcaggctgcagataacgctggtattccgatcccgcgtttttgttaccacgagaagttgccaatcgcggccaattgcagaatgtgtcttgtcgatgtcgagaaggtgccgaagcctttgccagcctgtgctacgccggtgatggaggggatgaaagtccgcacccgcagtgaaaaagccctgcaatatcagcgtagcgtgatggagttcttgctcatcaatcatcccctggattgtccgatttgtgatcagggaggcgagtgcgagttgcaggatgtttcaatgggctatggtcgctcggtcagccgctttcatgagcgtaaacgcgtggtaccggatgaggacattggtccgttggtcgctaccgagatgacccgctgtattcaatgcacgcgttgtgtgcgttttaccgctgacattgctggtacctatgagttgggcggtatgtatcgtggagagaatctgcaaatcggtacttatgacggtaaaccacttattactgagttatctgggaacgtggtcgatgtgtgcccggtcggtgcattgacgaacaaggtatttcagttccgtgctagaccgtgggaattaatggcctaccagtcgttggggtatcacgatgcgatgggttccaacttatttctgcatgtgcgtcagggcgaagtgttacgtacggtgccgcgtgacaatgagtatgtgaacgagtgttggttgtctgatcgtgatcgttattcgcatcaggggttgtacgcggcggaccgtgcggtcaagccgctaaagaaggttggtgaccagtggttggaagtgagttgggccgagggtgtgtccgctgccgctgagatcttgagtgcgcatcgtggcgatgcgcttggtgttttggtgcatcctgctacgtcgaacgaagagggggcattgttggcacgtctggcagcgggtctgggcaccggtaacctcgatcatcggatcttcaaccgtgatttttctgatgttgctgtggccgagccgtttgcattgccgttggcagagatcggcaacgccgatctggtcgtcttattcggaagcaacatacgtcaggagttaccgttgttgcatgcacgcctccgcaaagcggtcacttgcaacggcgccaaggtgtacgcggtaaatccggtcgattttgacttcaccttctcgctgactgggaagtccatcgttcctccgtcgcagttagccaatgcattgaccgatgcggcgttgctcaatgcggcgaaagcggctgcccgtgtggtgattgtggtcggtgcactggctgagaatcacccgcaaggagccacgttgcgggcggcggcgcgtcaatttgctgaggtcacaggtgcggcgttgtgccgcatcccgcaaggagcgaatgcgattggacttacccagcacggtgtgttgccgacaggtcgtgatgctgctgcgatgcttgtcgagtcgtgtcaggcttatgtgttgtacggtattgagccgggcttggactttgccgacacggcgaccgcgcgtcaggcactgcatggtgccaaggtggtcgcgttcagtcacttcgcttgtgcctcaacccgtgatgtcgcggatgtcatcttgcctattggtttattacctgagattgatgggacattgactaatcttgatggtcgcactcaggcggctaagccaggcggcaaattaccgcttgaggcccgtgagggatggcgtgtgctgcgtgccttgggaggtgagttggggctatccggttttggttttctcgatttggtgggtttgcgtgcgcagctgcggtcgcaccccgtggttccttcgacatcggcacagccgattgcaacgcaggaggggttggaagtggcggcgacaccggcgatctatcgtacggatgccgtcgtacgtcgtgctgctgcattgcaggcgcatccgctgaatgttgctccagccctggcgttacatccagagcaggcgaagcaattgcaagtggttgctggccagatagtcaaagtgggtaccgctgctggcaaagcaacgctgccagtggtgttagacacgcgtgtcgccttgggtacggtctggattgaaacgggtcacggtgtcaccgtaccgattggtgctggtcgcgtcacgatggtggcggtatgaatacatggttcttgaatgtggttgatccgttgcaccaatggtttctcgggtttggagacattggtgtcgtgttgtggaccgtcttgaagatactcatgatcgctatcccattaattgtgtcggtggcgttctatgtggtgtgggaacgcaaactgatcggttggatgcatgtgcgtcatgggccgatgtatgtcggcatgggtctctttcaagctttcgcggacgtttttaaacttctgtttaaagaggttctatatcctagcaaggcgcataaggcgatttttgtgatcgcgccgttgttgacgttagcgccctcattcgccgcttgggccgtcgtgccctttgatacaaaattagtgttgtctaacgccaatgtgggcttgttgtatttgttggcgatgacttcgctgggtgtctacggcatcattttggccggttgggcctctaattcgaagtatgccttcctgggggcaatgcgctctgccgctcaggtcgtcagctacgagatcgcgatgggctttgctttggtcggtgtgatgattgctgcgggcagtctcaatctgtctcagattgtgatggcgcaggcgggcagttctggtttctttgattggtttttgatcccgttatttcccttattcattgtgtattgggtatctggtgtggctgaaacgaatcgttctccgtttgatgttgtggagggtgagtctgaaattgtcgccggacatatggtggaatattccggcagtgtatttgcgctttttttcttggccgaatacgccaatatgattttggtcagtttcttgatttcgatttttttcctgggcggttggttgagtccaatccagggatgggtgagtggtcaggtttcaccgttgattgattgggtgtggaacggtggttggccgtggttgctgtttaaggtcttgttttttgccagcgcctatatttggttccgtgcgagtttcccccgctatcgttacgaccagattatgcgtttggggtggaaggtgtttatcccactgacgattgtgtggatcgcagtgacggcattaatggtgttttccggtgtgattcaaaagggcgtgtaagtgatgaacagagtgatgcattacttcaagagcctgctgttacttgaactgttggctggattgtggctgacgttgaaatacaccttcaggccgaaatacaccgtgttgtatccgatggagaagttcccgcaatcgccacgtttccgtggcctgcatgcattgcgccgttatcctaatggcgaggaacgttgcattgcttgcaagctctgtgaagcggtctgccccgcgttggcaattaccattgattctgccaaacgcgaagatggcacgcgtcgtaccacgcgttacgacattgatttgttcaaatgtatcttttgcggcttttgcgaagagagttgccctgttgattcgattgtggagactcacattcttgaatatcactttgagaaacgtggggagaatattgtgactaaaccgcagttattggccatcggtgatcggtttgaagcagagatcgccgaacgtcgtgctgccgatgccgctttccgttgaggtcatgatggattgggtaaatattgctttttatctcttttccgctgtcgctgttgcagcggctggtgccgtcatcagtgtgcgtcatccagtgtatgccgtgttatgtctgattctgacgttcttttccatggcctgcatctggttgctcgttggtgccgagttcctgggagtgactctggtgttggtctacgttggcgcggtgatggtgctgttcttgtttgtggtgatgatgctggatatcgataccagtcgattacgtgagggttgggtcagatatttgcccgttggtctattggtggctggggtgatgctggtgcagatggtggtgttgatcggtgtgaagatgcgcatggcgacgccgttcccggtggataatgctgctgctcaggctgctcatacgtccaatctaacctggttggcccatagtttgttcaccgactttttgttcccgtttgaatttgcggcagtgattttgacggtggctgtgatcgctgccgtgatgctgacgctgcgcaagcgtgagggtgtgaagactcaggacccgagtcagcaaactcgggtgaaggctgctgatcgcctgcgtatcgttagcatgccaactgaagaaccggttgctgtggttccgattcggagtgataccaacaacgatgcacaggagataaagccgtgattagtctgggtcatcttctcgtgttgggagcggccctattttgtatcagtctcgcgggtatctttctgaatcgtaagaatgtcatcgtattgttgatgtctatcgagctgatgttgttggccgtcaatgtcaacttcattgccttctctcgtcagcttggggacactgcgggccaattgttcgtgtttttcattttgaccgttgctgctgcagaggctgccattggcctcgcgatcctggtcactttgttccgtacccgccacacgatcaatgtggccgaagtcgatgctctgaagggctgatccgcagatggatattactctctccaagaatatgctgattgctgtggtccttgccccactgtttggcagcattattgccggattgttagggcgccaggtcggccgcaagggggcgcattgtgtgacccttctgggtgttgctgtcagttgcgcgttgtcgtgttggacgttttaccagctcgttggacaaggagcggcaccgtttaatcagaatctctatacctttttccaggtgggtgagtattctgcccatgtcggcttcatgattgatcgtctcactgcggtaatgatggttgtggtgacgtttgtgtcgctgttggtccatctctataccatcggctacatggaagaagacccggggtatcagcgcttttttagttatatctctctattcacgttctcgatgctcactttggtgatgagcaacaactttttacagttgtttttcggttgggaggcagtgggactggtgtcctacctcttgatcggtttttggttcaagcggccgagtgcgatatttgccaacatgaaggcgtttttggtgaatcgcgttggcgacttcggtttcttgcttggcattagtttggtgctgtacacgtttggcacattggattattcagtggtctttgccaacgtgggtagcctggtgggacaaaccactaacgtgtggagcggtaatgtcgacgtgtttggcagcatcatccacatcatggggccggtgagttggtcaacggcgacgttggtgtgtatttgtttgtttatcggtgcgatgggtaagtccgcacaggttccgttgcacgtgtggttgcctgattccatggaagggccaactcctatttcagcgttaatccatgcggccacgatggtgacggcagggatttttatggttgcacgcatgtcaccgttgttccaactcagtgaggttgcgttgcagttcgtgttgttcgttggtgccacgaccgcatttttcaccgggttgatcggcattgtgcagaatgacattaagcgtgtggtggcgtattccacgttatcgcagttgggttatatgacagtggcactgggtgtgtcggcgtattcggcggctgtgttccacctgatgacgcacgcgttctttaaagcactgctgtttcttgcggctggctcagtcattatcggcatgcatcatgagcaggatatgcgcaagatgggcgggctacgtaaatacatgccaataacctatatcaccagtgtgattggtacgttggctttggtggggacgccgttcttttctggattctattccaaggacaccatcattgaggctgcggcttatcatgccgagcatgcacacagttgggtagcgacttacggttactgggcggtgctcggcggtgtgcttgtgacgagtttctacagcttccgcttgttgtttctgacctttcatggtgaggagcgtttccgccgtgttggagacggacatgatgctgctgaccatgtaaacacacacacgtcaaacgatgaccatgcgcatggtgtgcatgagccgcacgaatcgccatgggtggtgacattgccgctaattttgctggcaattccttctattgcgttgggtttcttcacgattggtccgatgctgtttggtacggactgggcaggccatcatgccgttgaggcgatttggggtcagactgtctcattctttacaggcatcattgatttttatgatccggctcaggatacagttgctgttttgggtgaggaattccgaggtccggtggcttttgcgctgcatgggatgatgtccgcaccattctttttaacagttgtcgggttcctgcttgccgtgctgttgtatctgtggaagccgcaatggccagtgaaaatgcgtgaaaccttctcgttgccggtgcgtattctggagaacaagtacggttttgatgcgttgtggatcggtggtttttccggatggggtctcaagcttggtaatgtttcgcgcgccattgatacctatgtggtggatggtgttttggtgaatggttcggcacgcctgattgacgtggtggcgaatgtgttacgtcgcacgcaatctggttttgtctatcactatgccttcgcaatgatcattggtttgatcgctttgttggcagtgctgatgtgtttttggcgttgatctgttacggaataaaaatacgtgtcgaattggcctctactgtctctcttaatttggctgccgatcattggtggcctcttgattctggggttgcgcaacgtccatgttgctcgttgggcagcgttagcggtcgcgctggctacctttggattcagtctgtacttgttgggtggttacgatattgctaaagatgcgttgcagtttgttgagcagcatgtctggattcagacatatagtattggttacaaccttggtgtagatggcatcgcggtcgcgctggtgctgttgacgacgttggtgaccgtattggtattgatcggttcttggggggcgattaatcagcgtgttccccaatacgtggcggcgtttctcattcttgaaggggtgacaatcggtatcttcgcggcgacggacgcaatgcttttctatgtgttcttcgaggcgatgttgattccgatgttcttgatcatcggtgtctggggtggtccacgtcgcatctatgcagcgatcaagttttttctttatacctttctcggttcggtgttgatgttggttggcttgatctacctgtatttgaaggggggtagttttcagttggctgacttgtatgcaatgcagctcagtgccaaagagcagacatggttgttctttgcgttcttaattgcttttgcggtcaaggtcccaatgttccccgtgcatacgtggttgccggatgctcacgtggaagcgccgactgcaggttcagtgatcctggcggcgattgcgttgaagattggtggctacggtttcttgcgtttcaatctgccgattgtcccggatgcgagccacgagttcgcttgggtggtgattgcgttgtccttaattgcggtgatctatgtcggcttggttgcgttagtacaagaggatatgaagaaactgattgcttattcttcaattgcgcatatgggcttcgtgacattgggcatcttcatttccttcaccttggtacgtgattttggtaatacagatgctgcgcgccttgggctacagggagcaatggtgcaaatgatttcgcatggctttgtttctggtgcgatgttcacttgtattggcgtactgtacgatcggatgcatacccgttgtatcgctgattacggtggtgtcgtgaatgtgatgccatggtttgcaacgtttgccatgtttttttatatggcgaatgcgggtttgccgggaaccagtggtttcgttggtgagttcatggtgatccttgctagttttcaaaagcacccattggtggcgtttggtgcaggggcgactttggtcattactgctgcctacacgctgtggctgtataagcgtgtgttttttggggaggtggctaatacgcatgtcgctgcattgaaagacattaatattcgggaagcttccgtactcgcgctgttcgcgattggcgtgttggtgttggggctgtatcccaagccgctcattgatttgatggattcttccattgccaagctcactactcagattgccgtgagcaagctgtgatcggctgcggcacaattgatttcaggattcgataatgaccatcccgacatctgagttaaacatcgccgatctggctcccttgttgccggagatggtccttctaggtagtacctttgccttgttgatgatcgatctatttatcggtcaagcgcggaaggtgtggacgcattttctttcggttgcgattttgggtgttgtgttgtccatgttagtcgccggtgttggcgggcaaggtgcagcgtttcatgggatgtttgtgcgtgatagcgctgccgatgtgatgaaagtggtgattgtcttggtcagcgccctaagcttggtttacgggtggagttacttgcgtgagcgcaacttgttccagggtgaaattccagtgctcgtgttgtttgccaccttggggatgatggtcctggtgtctgcaggtcacttgctgatggtgtacctggggcttgagctgttggcgctttgttcctatgcgttggttgcggtcaatcgcgatagcaaaatatcgactgaggcagcgatgaagtacatcgtgcttggttcgttggcctctggtttgctcttatatggaatgtctttgatttacggcgccactggcacactcagtctgcccggtatcagcgatatgatccatggttcatcggaaaagacgctgctgttgacgggtacggtatttttgattgccggagtggcttttaaacttggtgctgcgccgtttcatatgtggttgcccgatgtgtatcaaggggcgccgacacccattgttttgtttatcagttcggcgccaaagttggcagcattcggtatggcttatcggctactggaagtgggtgtcggtccattgtcgccgcagtggcatttgatttttggcggtctggcggcgttctctttggtgattggcaatctgatggcgattgtgcagaccaacctgaagcgtatgctggcttactcgactgtttctcatgtcggttttttgatgatgggtgtgtctggtggcggcatacacggttattcctcggccatgttctatgtgttgagttacgcaatcatgtctaccgcttcgtttggagcgattattgccctgtcacgccgtggttccgaggctgagaatattgacgactttaaagggttgagcacgcgtcatccttggatggcggccctgctcttatgtgtcatggcttcgttagctggtcttcctcccttcttaggattttggacaaaattggctgtgctcggtgccgcagtccaggggggcatgctgtggttggcgattcttggggtgatctgtgcggtgattggtgcttactattatcttcgggtcatcaaagtgatgtattttgatgagcctgttggtgagccgctcccagtgaatgatgatcgtgtcctgggggtcattctgagtattaatgtgttcgctctgttggctttaggaatcctttggaacccgatcattgattggtgccagaaggcatttgctcatctggcctgaagattcccgcgcataacagcatagaaagtcgcgccacttttgcttgtttttaattttaatcggcttgttggaatgggaagtcggtgcggtgttgtcttagaaaaaatgatttgaaagctgtgatagatagggctaggacagggtggagtctgtttctgatccttggatcgcttgttttagatgaattagtgttcgatgtcttctttcgattgatagtgcgtcagattccccgtgaagcgccaggtatcaccaatcgtggtgattggtataccacctcgtgttgtgctctcttcctcgggcttggctggccatcttttaataatgaggttcacgtcgcagtctcatgttagggatgatgcaaatcttgaataacgatctttatgagttttattttttctgggcgtccaagaggcagcgcaagtctctcgcatgaataagtgacttgggaagtaggctgttggagcatgtaacggaggcagtgagtactgccttgcaatgcgttatttgcagcttccgatctatatgttactggcgatgatttcagccttattggcttcagagaagccagccgctgataaaggcgattccctcgaacgtgtgaggggatgccatataagcccggtagtaaggtcgtcaagatgataagtgactatcgaagtcacccacgcaggcggcttcactccatgcgtaaaccaccgttaactgcgtagtcggcacctgtgacgtaggcagcttcatctgaaaccagccaagcgcatagcccagcgacttcttcggctttgcccaggcgccgcattggtactgagttggcgagacggtcaaggacgtctggggggaaactgctgattgcagcgctggcgatataccctggggaaatggtatttacggtgacgttgcgggtagcgacttcttgtgcaagtgcacgcgtgaagccgtgcattgcggcctttgcagtggcgtagttcacttggcctatttgacctttgtgcgcgctcaccgaaccaatgttgacgatacgtccccaattgcgcgcggtcatggcgtcaatgacttgtttagtgatattgaacagtgaattgaggttgctgctgatgacactgttccagtcttcacggcccatttgccggaacagcatgtcgcggttgttaccggcgttattgaccaaaacgtcaatctcgccgacttcggcttttaccttggcaaaggcggataccgttgaatcccaatcggcagcattgccttcagaggcgatgaagtcgaagccaagttcacgttgctcacgcagccagttagctttgcgaggcgagttggggccacagccagccaccacggtatggccgttgcgtgccaacttctggcagattgcagttccgatactgcccatgccgctggtgacgtaggcgatgcgaagggtcatacgagactccttgtagaaattaaaagtgggcgtgtggagattagatgagaagccaagttcatgcggccagtgggtaaatcaaaaacaataggctacttagtaatagcaccattgagattaacactgcccatttcagagcaaaacgttggtggtcaccgaaatccactttggcaagcccgaccagcaggtaagtggaagggacgagtgggctcaacagatgtactggttgtccagccaatgaggcgcgtgccatttcaactggggtaataccgtagtggctggcggcttcggagaggatcggtagcaccccaaaatagaatgcatcattggacatgaaaaaagtgaagggcatgctggcgatggcagtaatcaccgccaaatgggggcccaagctgtctgggatgagtgccagaaagctgcgtgacatcgcgtcgaccattccagtgtttgacaagatgcctgtgaagatgccggcagcaaagatcaacgagaccactgaaagaacgttccctgcatgattaaccacgcgacggcgttgttctgccaagtttggataattaatcaggagtgctaatgcgaagccgatcatgaacaggatgggcatcggaagtatgccaacgactaatccagccatcaaggcgatagtgagcgcaaaattcacccacagcagcttgggtctcttgatatcttcggcatcgccttccatggtgggcagcgcatcttcatcatcgtgcattgcgtaactattccaagcgccgctgtcaggcaatttggccacacccagacgtttgcgttccttcatgcctagccaccatgccagcgtcagaatgccgatgatggcgatgcccatcgccgggatgagggggatgaagacatcggctggatcgacacgtagtgcggtcgccgcgcgtgcggttgggccgccccatggtgtcaggttcatcactccgccggccaggatggtcacgcaagtcagattcagtgcgtttaggcccagacgctggtacagcggtagcattgccgagacggtgatcatgtaggttgtcgagccgtcaccgtcgagtgagatcagtagcgccaggattgccgtacccatcacgatcttcatcggatcgcctttgactatccgcagaatgcgccgtacgagcggatcgaacagcccagcatcaatcatcaccccgaagtaaagaatggcgaacatcagcatcacgccggttggcgcaatctttttgatcccttcaagcatcatttcgctcatgctggagccgaagccgccagccaatgcgaacacaatgggcacgatgatcagtgagaccagcggcgagagccgtttgctcatgatcaaatacatgaaggtgatgaccattccgaagccgagcacagtcagcatggagagtttccttggaatgttacaggtgggaggcgatagcatgccgttatcgtgcctacgccgcacctgttgtggcgtagtatttggctgaaagtcagtatttcgacggaggtgtcggcgcggcgcggcatgctaaaagtcgtaatggaaacgcccggtcaatgcccgggtatggtctaaggtggtgccgaccagatggtcacggttacggctatcaatcaggtccagcatcagtcttaggttgggttgaatgtaccagtttacgcccagtgtccaggaagcggtggaggcattcaggaaattgggttggttgttgtggtgttggttgccccacatgcgatcgtatcgcaacgccaattctaatgcaccacgcggatggtgcagtgctttgatacgtgtgaaccgtccagtgttgcgatcgtaggcacgcgattcacccgtgacgaaccaactgataaagccgtaggccgattgcacggtggcgcgttgcatgccgtcgttgaatgcaccgccgatatactcactttgccatgacagcggtccgcgcacttgcgcgtattccagtgcccatctgttcactttggtatcgcgtccgttggcgaaatgtgccagcgtaatgtcactgttgtcggacaggtgcccagccgggagtgggcggatgcttaacgcggtcatgccgtcgctgccgggatgatcgtaacgctggtgtgccagcgacaggccaagatgcagcacgtcgccttctggtgtgtctcgcgaccaggttccgcggccactgagcccgcgcccgttgacgttggagagactaatgctgtccaggctgtaggcgctgatccaccaagtggtgttttggcgtgtggcttgccatgacacacccttgtggtactccggtgccagtgtattggcccctccactgcgttccaagaattggccgtagtcagagctggtgcggtcgtctaagctgaaatgttgtttgaactgtccgagggtcagcgtgccggtgttgccaaagtcgtgtctgagatagacatctcccatctcgatacttttgcctttgaacttatcctgcaaatttgtgaaattgccttctatcgtgtagtcgaaggcgaaaatcttacccgtcacatcaagccagaatctgcggatctcgttatcgctacgatttggagtcccgcgagcgtcgttgtcgaatagtgcaaaatcccattcaaaccgcccccccaatttggcggttacattgcggtcactgtgatcggccgcctgagttgccgaggcggctaagcctagcagtagggaaacaaaaatagtgcgcaggcgtcgtatcgccacataccctccgatgtgttgtgtggtgtgtgaaacttaagcagaacctcaagtgaatagcttcagcttaggtgggcaaagctgtcattgacctgtcaatgacgccaaggcacggacagacattgaatatcaagagtgaggtgttactgcattgaggtacgcacgttggtctttacgaaacccttggatttgatgagattcaatgcgcctattgttgattgaggacaatgcggatcttgccgatgcgatcatccggcgcatgcggcgtcacgggcatgcggtggattggcagagcgatggtctagctgctgcgggcgtgttgcgttaccagcgctttgacctggtggtgttggatattggcttacccagtttggatggcttgcagttgctgagcgagttgcgccagcgtggcgacaggacaccggtgctgatgctgacggcacgcgatgccattgaagatcgtgtgtatacgttgaatgttggtgccgacgactacttgagcaaaccgttcgactttcgtgagtttgaggcgcgttgccgtgttttgttacgtcgtaaccgtggtagtgcgagtgaagtggtgcggattggcagctttgagtttgataatgcggcgcatcgcatccgtttggacggtgagccgatcaaattgcccaatcgtgaataccggcttctggagatattgattgcccggttgggtcaaatcgtgggtaaagacgagattggcaacagcttgttcaacttcgatgacaatgccgggccgaatgcgattgaactttatgtggcacggttgcgtaggaagttggaggcggcgccattgcgtatcgtcactgtgcgtggtgcaggctatctcatagaaccgatcgtcgaagactcgggccatgaagcgcgggattgacggtggttcgatccgccgtaccttgtggctgtatctcggtgcattgtcgatgatcagcatcgctctcctgttttttgccgcgcgtgactacgggcagcgtgcggctgaccgttcttacgaccatttattggtgtcctctgccttatcgatcttgggcggcgtctcgctggtcggtggacagtggcaggtagatttgccttacgtggcgttggatgtattggggatggcgcctgaagaccgggttttttatcgtgtttacgatgcgcacggtcatacgataactgggtatggcgacctaccatcaccgccgcgtgtgccgttgcctggcgaggcgcccttgctgttcgatgttgactacagcggtgagcgcgtgcgcttcgtctccgtggcacggacgcttgcttcagtggcaacactgactgaggtgtatgtgcaggttggtcaaacccggcaggcgcgcgatgcgttggcgcatgaaatagtggtgaacgctttgttggtgattgctgtgttgacgctgttgtcactggccttggttgcgctgggtgtatatcgcgcgttgtggccgttgcgtcggatcgagcgtgatttagtgcagcgccaaccctcggatctaaagccgttgacgactgcgccgccacaagaaatggcgcagatggttggtgcactgaaccactttatggagcgcctctccaacagtaatgaaacgttacgtgcgtttatggcggaagcggcgcatcagatgcgtacaccactggctgcattgcgtgcgcaggcgcagcttgcattggaggaaggggatgcgttccagttgcggagcagtttgatggcgattgagcgcaatgcaagccacatgagccgcttgcttaaccagttgctgagcgatgccagtgcgattcatcgtacccaggtacagcactttgaggcagtaaatctacttgagttgatccgccaagccgtgtctgaagttgtgtcacatagagaggagatgttacgtgtgcagtggacgattgatccgcagccagcatgggtacgtggtgatgccttgttactgcgcgaggcattgaaaaatctggtcgacaatgcctgcaaatacggaggcggcgacttacagttgacattgaccagtgatgcacatgagtgcgtgttgacgttagccgatcaaggtccggggattgctccgggtgaggctgaacgtgtgtttgagcgttttgtgcgtggtacgcatgcatccccagggggggcgggtctgggactggcgattgttaaacggatcattgataaccatcgtggccgtattgatctatccaatcgcattgatggtggcctgatggtcacgctgcgttttcctaggtggcatgcatgatgatccgtgttgctgtcttactactgttattgacttgccattttatggtgtgggcgcatcctggtgaggtgcgacatttttcaacccaaagggcggccacctcgcaactgcgcattcaaggttccaacgacttggacatgtttgctttggtgattgctgattaccagcgcttgcatcctggaactaaagtgacctatgaagaagtgagtgcttcggagatatatgaccgttacctgcatccagcatcgggtcagcccccatcggatctattgatcggcgcaagcatggatttacagatcaagctggcaaatgacggccacgcattggcctatcgttcgtcgcgaaccagggcacttccggcctgggcgcagtggcgttatgaggtgttcgggatcggttatgaaccagcggtcatcgtctacaacacccggcggctgccgtcgccgcaggtgccacgcacccgccaccaattgcttgcgttgctgcgcgcccctgaggcgccattgcgtggtcagattggaacctatgatgtggagcgcagtgcggtgggttacctgttgagcactcaggatgcgcaactcggcagtattgctggcgcgttgtgggaggcgatgggggaggaccgagtgcagttggaagcagggacaggggcgttgttggatcgtgtcgccagcggcgaattgctattggcctataacgtacttggttcgtatgcgcaggcgcgcgtggatgctggtgcgcctcttggtatcgtgcagcctgaggattacaccctgctggcattgcgtaccgcagtgatcccgcgtggtggtgtgcatgtgtctgaggcgcagtgtttccttgattatttgttgtcagagcgcggccaacgggtcctgtcgcatgaagtacggctgatgccggtgttaccggcgagtgatcgtattgtgtccatgttccgtcctattgcacttggaccagggctgctggtgtatctggatacgttgaagcgtcgtcaatttctgtatacgtggcacagtagcatgttgccactccgttgagtgctcagtgtatgagggttctaacagtttttcaataatgtgataagatacgcattatgctcttcataatggagagattagttggcattggcgaagcggccctgggggtgtcgatcatgatgttgcggcgctgggaagcttcaggccggttgatggccgagcatacggtcggcggtcatcgccgctacgacatggcgaaattgcccccagagatgtttcgtgcacaactggtgttcgcgctgtgcgaggccaaaaatgttgaagtggtcattcttaaccaaggccaagacacaaactttgaagaagaccttgccaaagatgtgctggagatcatgactgtgttcagtgcacggttgtacggcagccgctcgcgcaagaaccagagattgctggaggctgtgaagacagcggtagaggcatcgccatgctgattgcccaccgtattgcgctggacccgaacaatgtgcaagcgacccacctgtcgcgtgcggcaggcgtggctcgttttgcctataactgggcgttggccgagtggaggcgtcagtatgaagcatgcatgtatgttggacagcgcccttcccaagccatcgcaacattccttgcggcgacaactgaacgcaatcaagcgcgagcagtttccgtggatgagcgaagtcaccaagaacgcgcctcaaatggcgatcatccagttgggccgggcattccagaacttcttcgcaggtcgtgccaagtatccgaagttccgtaaaaagggcatgcatgaccgattcacgctgaccaatgaccagtttgaccttgaggcttcacgcattcgcattcctcgcctgggctgggtgcgcatgcgtgagacgttacgctttgcgggaaaaatcatgttagccgccgtgtcgcgtgtggctggacgttggtttgttagcatcaccgtggacgtgcccgatccatcacatctacctcaagctgaaaaccaaggcgcggtgggtgttgatctgggtgtgttggcgctggcaacgctctcaaccggagaaacaatctgtggccccaggccccacagggcgctgctgggtcgcctgcgcaggctttcgcggagtgtgtcgcgtaaagtcaaaggctctgccaatcgtcacaaagccaaagccacattggcgaatctacatgcacgtattgcagcaattcgcttagatgcactgcacacactcacgagcgatcttacccggcgctttcataccattggcattgagaacctgaatgtcaaaggcatgcttaggaatcgccatttggcacgttccatcgccgatatgggtttctttgaattcaggcggcagcttgaatacaaggcgatgatgcgcggggggcaggttgtggtggctaatcgtttctttgccagtagcaagaggtgcttgacgtgcgggcacacgctcaatgagttgcccccttaaaaaagggggttaatttttgcaatttagtagaaaaatcgcatctaagcgtgtgatttaaatgagaagtaacataatcaaaggtggaataaacgttttgcagcggtgcgcgcttcttatcttgaatgccgtttcactagaatagcggcgcttgttcgatcatgctggtagcttcgttggcctggtactctgctgttttcctgatgatgcttgatggcattttggtatctcccggcccctgccgccggttgcgggtgtcctgggggcgatggagataagtcaacataaagttgatcattatgtttatttcccgtagatgtagttagttgcgcgcatgaaaaaccaccgctgggggtggagttagctaaattcataaattttcgataagaacacacccacaccagggagtggacctataagcccctctctctcagttacgtaccgatagacaccagcttgatgcgacgggcgtgatacccaatagggctgcgcatcttagtcgctttcaagcatggcgatgtatgctttggccatcatatcgagcatggaaggatcgtattgctctggcagggagagtcctgctgctttggactgcggcacgataaatgtttcgtagaaatcccgtcgctgttcagatgtcgcatcggcagtagaaagccatgcgcgccctatgcttgccgcagcttcctgttgctttttcttggattggctttgttgctcaaggagctgattttgcagcgccgcctgcgccgccatgcgctcctcagccctttgtctcccttcgtcgaagccttttttaacgtactcgtaaatttgtagtggagtagcggcaaccgtagttccgcttacggctagaaaccccaaaactaacattctcttcatatatagtctctccccataacgaagttgaattgatttttaattagttaactctttcaatcttatttattagatacagcttgccgccaattgatcccttactctgtgaactcaaacggttgtatagcatggttatcgctgacaacaaaaagtctcccccccatattgatattgcaagtgcttgatctgctggtcgtgcccaagtttcactaaatagatgccgtcactctcaaaggaatgcgttccggtgtttacaagtacgacttcccctgttgaagcggtggggatcatggagtcgcctttgccagtgacgagtatcagatgctcgggggcggcaggaatcttatcaacgaacgcaggagggcttacgagtactcaaccgtgcggatcaaatctgacatgtcttcgtttccacgtccgtcacccataccggatttactcatttgggcgacacggaataaccggagggtgttatagggacagggtcagccggagaattattagcgagaagcattttcccttcagcgtcgttcaaccagtcgatagaaattccaagatttgcgagtggcttgcgctgctcatctgggacgcgctggtcaggattataccagttgtagagtttctagttctagttctagttctagttctagttctagttctagttctagttctagttctagttctagttctagttctagttctagttctagttctagttctagttctagtttcccgacaatccgagtttggctcggaaagccgcatgattcccagcagcccctacatgctgctattgccgcatcgagtcgctgttgaaaaggtgtgggtacctccatgttcgaatcgtaaacaggctgtttacattcgtccatgaaaattatggatgacattaaatgtcatcataatgtttacttttttatgtaaacgaccatacatcccgatgctgacttgatcaatcgccttggcggacccgctgaaatttccagggagcttgggatagatccacgtgtgggcggcacgcagcgcgtgtagaactggaagtaccgaggcatccccgaaatatggagattgtgccgctgtgacatcttctccgatcccgccgcaggccacatgccggaggtgtccgatgcagcgtgaggaagaaatcatttccattgcaaagacaaaagctctaccgggtattgctccccccatcagcgaaaagatcatttcgcccgaagaagtgccatatgcgggagcggaattagctaaacgcattgtgtttttagatcccacggtttcatccttgtttacgcactttgtataaacccacattgcatctctttaagacactatttgctcgaaagagaaaaaaatcagagaggaaatagcgcgttttagatcgcaaatagaatttttgcagattcatcagcaatcagagtttttgaagaagcatctagacgctgtggggaaattcctgtgacgtttgatgcgctgtattcgatcttttaaatgacatcgaaatgattcgtattgatgaacccatgtacgccaatccaacccacattcgtagttacccggtgaaggtgcgtttcaacgatgcagagtgtgcgttgatatttgcctttgcttaatacaacgggatgcagcccgctgcgttggttcgtgagctggccttatcagcggtcactgctgcgatagaaaaggataagcggcaagtagacgcggcttgaagtgtctaactagtctctttggagaccctgtgaagattgaatctaacactggttgttcaaaaaatgtttgagcaatacgcacagatctatgggctagcttgtgtttaggaagcggtagaacacgcagcaagacgcgcaatcgagcgcagctatttgctccgagtgaggagtatttattcagccgtagagaaaggcagggtgatccatttggggggatttataaaagcgttcatgagtacgtcatgcaaataagtgataacagcggggtcgtgcacactgtgcactctggcgatggtacagccaaattagatggtttttaatgtcatgagcgccccttctttaaagattggttgtgtgagaactccattatctcaaaggtgcgagcgctctttttttgagaaaattcatgaggataaaaaagaaaaccattgggccacacatggagcacaccgaccaaaaggtaagggcgctcgtgaggggaatacccaatgaacaactacgcacgccccttggtgatgacgtacacgaggcatcagaagtcatcgtgcggaaagtcgttcgctggttggcagatgggtttaccgaaggtgctgcaatgaagcgatacccccatgtattgaatatcctattcattttcattgcctgccactatgacatcggaggtaggctgtgaattattttgaactctacccaggcgactatctgtgggatacaggcaggccgcttatcgcttatcgagcatggcgcgtacctgaaactgctgctggactactacgttacagtgcagcctttgcctgccgattggaaagatctatatatcattgcttgcgctattacagcggctgaaaagggtcttcaatttggcgtaattcagtcattggcgcggtagatcccatctcaacaaccactttcttcggatgattctccaggaaacttgacagcaagctcgttgattatcgcagtatataataatatatcatgttgtgagtttcacgatattttagggatatttgagtttaattttctggggcttggtcattattttttatattgaattaatggcattgatatagacggatgacatattttaatctgatgctatcaagtttttattaatgtgatttaataggatgaaatgttgcagtgtggggttttattaatcagtggttaataaatgcctatcttttttaaaatgtaatctttttaatttggagtttcttattttcctctgtggtatgggtggttagtgagtatcgttgctgctcgatataattgttcaacaacgatcagccttaccagcatgtgtggtagcgtgagtggccctaatgaccagcgctcgttggagatattaagtacttcctgactatgcccttcaggtccgccgatcaagaatactaaattacgtcctaatccacgccagtgttccatgcgctttgctaattgttctgaattgagggacttacctttcacgtccaaggtgacggcatagggttgtttaggtaaagcggccatgacgcgtcgtccttcgtcttcaatggcttgttgcggatcgtggtttttgccgcgcaggctgggttcgatttcaaccaactcgagcggtagccagtaagaaagacgtttgtggtactcagcaaagccttgcgcaacccaggttggaacacgttcaccagttgcaatgaggaggcatttcatcattgagacgtaagggttaattcacgctctatcttaatacttaggattgcggatactaggattgttgcatttgtatctctcagtctgaatgaaaacaacacaacgatttctaaacaggcttctaactcttgatttacgaatgcactaacgacgatgctcgctacccggccagaaaaaaaggccggttttactagatttttaccgttttttaggagaaaaatgtgacccccgtcgctactgattcacagcggtatattgcccgcaatcttctgtgtgcatccatttctggtgtactcctcgttgctgccgtcagcgttcaggcacaagaaactaacgctgcaagcaatttagaacgtattaccgtcacaggttctaatatcccccgcacggatacagagaccgcgtcgccagtccagattgtcactcgtgaggacatcgcgcgttccggtcgtgccacagttggagaatatctgcagactttgacttctgatggtcagggttcgatacccaagaattttggtaacggtttcgcaatgggtgggagtggtatctcgttgcgtggtttgggtgccggctccactctggtgctgattaacggtcgtcgtatcgcttcctacgggttggccgacgatggtcagaagttgttcgctgatttgagtagcatcccgatggatgcggttgagcgtgttgaagttctgaaggacggtgcgtcctcaatttacggatctgacgcgattgctggtgtagtcaatatcattttgcgtaatgacttccagggcgctcttgtgagtgcttcatatggtctttctggttatggggatggccatacccccaaggctacaatgaccgcaggcgttggtaatttggcgtccgatggctggaatgcgcttgtgagcgtggatgttggcaagagtgatgggatcatgacgagtgaccggaaagatcgtaagtggatcggtactggtgatattcgtccctggggctacgacctcgcgaacagtcagcagtttcttcggggcgcgatcactggcaaaggtactgctgccgactcttcgccggtaggggccgtccgtaacccatctaataatcagttcagttcgctaccaggctgttcaaacttttccagtgtttcgccgcaggatccaggaggcggctgcttatgggatgttgctcagttccgtagcctgactccggatgagaaatacgccaacgtcttcactcgtggtactttcactctgtttgataccactgagttatataccgagctgagctactctaagaaaaagtccgagttcagtaatttaccatctgccgtttcaggtgcttggggctatccaggcggtgcggtcaatgccagtagtggtgatggtgctacggtcttggcccccggccatccggacaacccgtacaacgtacctgcgcgcgtgcgttatgcagcgtttgacgttggccctcgtgtgaaagaatacacaaatgactttatgcgtgttgtgttgggaattaagggaggtgttgctggttgggattatgatgtcagtgccttgcattctcagtcccaaatggacaggaagttcactggttacttgcgctatagcgctgtgcgttgtgtgcttggaaacttagcttgccctgctggtgtatggaatattggtaaaggctccgaaactaacccgcggtcgttgtacgattttatttcgcctgtacttagctcgcaggccaaaaccaagctggatgtgttcgatgcaaggctctcgcgtgcattggctgacttatccggtggtgccatgggcttggcgatgggggttgaatatcgtcgtgatcaagcctcgttaaccccagcgacttataccgatattggtgacatcatcggtttggggtattcggcctatagtggtgaagaaaaggtgagtgctgcgtatgctgaactcgccgcgccgtttaccaaggcttttgagacgactgtggctgctcgcgttgatcactacagtggtggcagtacggctgttactccgaagttcggtatgaagtggaagccttttgattggtttgcgctacgcggtacttatgcccagggtttccgtgctccgaatgctgctgagtccggtaaaggtggtttagctgcgtttgcgagcgtaagcgatccagtgcgttgtgcggctgcgggggggagtggtgttgaatgtgcgcctcgtctcgtttcagttatcactactccgaatccagatctgaagcctgagaagtcaaagagttatacgcttggcatggtgttccagccgactagcagtacatctatgacggtggatggctggcaaatcaagcgtactaaagagattgctcagatcggcacagtcgatgcgatcaaagcaggtgatgtaatacgtgacgataacctgttgaatggtgttgccggcaccgggcagttgcttggggtcaaggctaaatacgtcaatctcaacgccactacagcacgtggtgtggatactgacgtacagcagcgtattgccatgggcggactcggtgatttgatcctggatttgcagtggagtcgcatgcttaagtttcagcgcgaggaagctaatggcaacatcagtgagtacgccggtacgcatggtaattgcgatgtaagcaattgcattggtactccgaaggaccgaattaattttggggcgacttggaaattgaacaacatcagcgtgagtgcgttaggccattaccgtggcccgatggaaaataggctgtttaaaggtggtgcttgtgtcagccattttgccgatggaagtgatgctccaattgattgccgtttgaacgcgtttacctcggtggatttgtcagcaaattggcaggccactgaagcactggccgtgtttggttcagtgcagaacctgtttgaccgaatcgctccacttgatccgttgactggtggcgcaatgaactacaatccgttggattctgcgggtgcggttggtcgcttcttcacggttggtgctcgctacgcctttaagtgattggtgtttgttagactcgaaaaacccccggtcattagagaccgggggtttttgtgccaatgtgtaaggcacattagtcccactatgttgagtggtaggagacacttagatgagtgtatttcagtggactgtaggggcccgatccatcagtctacatggagtttatgaaacggctatatgcttgactgattaggttgtcaggagtttgttggaataggtatccagagttttgatctgggattggtaggatgttttttaatgttcaatagcagcattgtgaggacgtatgtagatgggtgaggaagtagttgggttgattcacttgagtgtggctgcagaaaaaccttgtctttgttatttagctgtttcagctgaatagaggtttccttcgctcagctttgaagccgactaatagcccgagcagggccagtgcaacgaaccaaaacatgctccacattggcatagatagccccagaaatcgccaatcaatattgccgcagtcgctggtacctgtgagcactgtgcggaacacttcaaacggccccatcgtttcactgagaaagctcaacggtgaaccgcaggaggaaattgtattgtgtggcatgagttgtacccaaacatgtcgaccagcgatgcctgtaccgattgctgctgttagaaatatcaataggccgtatgctttgcgcgtatatacgttgctggagttgtacagtcctgcgattagaaacaggatacccagcacggcaaaggcgatgcgctggaagatgcatagtgggcatggttccagaccttgatgcagttgcagaaaaatcgcgtatgccagtaatccggtacaaaataaaaagcctgttaagcattgagctctgaaactccactgcaaagcattcattgattactgctcacggaaagtatcgtggatacatggggtattgttcgcgcaattacttaagttgcatacattcgtcaagttcgtgatgatcctgtaccacactgtctctgtcgtgctgggtctattgatgatgctaaaagactgcaatcaccgtaaagctttgccacattaagtgatactggggcttaggtctatacggtgttatatattttttatgaattatttatttttattattatcaatttcattgatgtagtagataacgtttttctatgttatagagcaatgtcatgagcgtttgtgtatgaattataactttggctacgccatgaatgggtctggttattcgtttgatcaccattccctggaagagtagagcgatatcctcatactcattgattcattttcgatcaatactaaccaagcctggaaatgtcagtggattcttttgttcatgacatgagaaaagaaagtattccgtttgatgtggtagtgcagttacatgaggatgtcgaagctgcggtgcagtggttggtaacttggtggtatatatttcaagtaatgagcgcctttattattcagacgagtcatggcctatctacgttgagactggtccaataaggtgttttctggaagatatcgcagacgttagggatatagctggtagctacaggaactgcatgacacgggtttatatgccctgtttgtgtcttggtttagcgaatattttggtaaatctgacgatgtgaggtgacagtgaattggaaacggttgtatccaagcaagcaactgcgcgccgagatcgggccaaagcttctgagatttatcgagttatctgtaaaatcaatgacttatggggaaagattccggtatagaagaggcgttacagcgttttttctctttctaaaacaaagcctggcatgagccaggctttgctatggagcacattacaattcagatcaattctgaacgttcaactcagtacggcggttcttcgcacgacctgctggggttttgtttgtatcaattggatgggtctccccatatccgactggtccaatcaggcgagatgcgtcgataccattgttacgcaggtagtcatacacgactttagcgcgacgttccgatagcttcttgttataagcagccggacctgtcgaatcggtatggccagccacctctacgtgcaagtcagggtagcgtctcaagatttcggtagcctccttaagaaccgcaacggcgtcaggacgaagcttagatttgtcaaaatcgaagtttacgccttttaagtcaatcgacactggcaccggacatccatctggtccgatcgtctggccgggttgtgagttcgggcacttgtcgtcacagtcgttgactccatctccatcgctatccaattcagcacagcttggagcaggcggtggcggtggcggtgttggagctggcggagcaggtggtggcgttggtgaggcagcggctggaccaaatgggatcacgacaccaactgaagccaaggtatcaccaaaccatttcttgctcgaaggtgccgcaacaccagccaccggctgacgcacgctatccttgtcatggtcaccacgataagctacttcagcacggatggcgacacggctgctgaatgtggtttgcaagccagcgcctaccttagcagcaaagccgcctttcttacgttcgccaggggagtttgcgtttggggtgttatcaaattcctcttctgaacgttggtaccccgctcctaacaacaagtaaggattccagccgcggttatcctggatgaaatggcgacgaaaatcgacagagaagccatattggctccagtttagatctttgttgcttttgaactgcgggttctgatagttcagtgtgccgtcgatcgaccaaactggattgatgaacttaccaattccaagagtgaaaaaaggtgcatcgttggtaagacgacgcttatcttggaagttaaacccggtggaaccagcgagataccaccggtcatcgaattcctgtgcagaagcaacttggatgatagctataccacccagcagcgcagcagtaaggattttctttttcataacagctccttgagtcaagggatataaaaaactgcagggcatgttgtgttagtacatgatgcttgtcacatccagacagcagtcccacacaccattggcggcgcagagtaagcccagccatgtgaagactatgttaacagtcatataacatgtaaatccatatcctgccccaatatttaacttgctcctcaatcgtctcccccaggttcataatatgtatgagttggatatcgatcaaaggagaaccatattacttcttaaaaaacttctcgacttacagattacagaggatcacccatgacttaagcaagtagggatggtttcaggttttttcaagctgataatcgcaatctacgcaaaagctctcgggattgtagcattaattgcatgccaagcattgcttctaacttctatttttaccttcgtttttgcggtgcttgaaggcaagttcagcattctaatattcgtggtcatttcgacagaatccaattctgttttggagtttttagaaaatttattgtttataagtgtattgatctggcaggtctagagtttttctaaggctgaagcaggttgcctgtattactgcataccctgttctagcattgtttgtgattagaaaattgctcgaatatcacggagttttcctgactgcttcagtcgtctagaaatacgaaagaaggtcgttatggttgctgaattattgcccatgtgttgcttagttttttcttggaaaactcaacgatgtataccaagctgagctgatttgaaatcagcttgatcagtgcgatgttatgtgattagtggagctgatataggtgatagcagacttcttgttttaggatgtgtaaataaaactcaatgcatccgatgtgatggtgactttttggccgatatggttatgcattgtgttgttgtcatgttttttgtgaatattcatgtcaatagattgaaattcgttggataacgctccgtggctatcgtcgcgtgaatgtgtcagataaccatttatttatcgaagcggcgttgtatcgcaacggtgcgatatctgcattgtttaggtgatttttgcatttgcatgtattggcaggcgacttattgcgcgaatacctcgcactgcttgtgatgccgatgactgacaaagtgaagtgcggaagcagattgagcggatagtgttgcgtttgaaatgtgacaaatgtctaatgtcaaatggcaataaactgcctggttactctaaatcatcgggatgaaggggcgtctatatctccgtaacggtacttgtcaacgcaatttagttcatctcacattctttctgtttatgatttttatgtgtgctttccgatggggatgacacactgtgttgctacatatttcgtttgtgatgatagaggtgacggatatcgaacattttttgatcgttccgatcattgtgcgtacggattagcatttagcctgggccttggaatatctcatcaaaaagctttagtgatttataaagttttagtgatttatttagcagtgagatgtttcaagtaagctggttatggttgattctcagcgcagcacaagcccaggacatctggggtacgtaaaatcacatcgaccatctacatgtcaaaactgccattgccgataagcgcggagggcagttatggcacgtgctgaatacggctgatttgatgcagcggttaccgatggtttttattgtgttgtactggaaccgtaagtcgaaccgcccttgctatagttgtcgcagtgtatggcacgtgcaatttgctcggacgttcatttgaatgtatcgcgtatgtgtgtccaatctccatgcgtgatgtggtatttcgttaaactcaagcattaccgcctcagtcttcacctgtttaaacgtctcaggagagtttgtaagtaatatgttgcttagactgtgggtagcactttacctggattgagaataccgtctggatcgaatgcggccttgaccgcacgcattgctgctagcgttggtgtatcgaatgcttgtgtcatgaagtcacgcttggctacgccaatcccgtgctcacctgacagggtgcctccaagagtcaagactaacttaaatagctttggtagcgttgcctgcgcccgcgtaatgtcttccgcatcctgatcgtcatacatgatattcacatgtagatttccgttaccggcgtgcccaaaggtgacaatgggtaatccgctctcggcagccaatacttctatgccagcaaccaaatcaggaatacgcgagacgggaacaacaacgtcttcgtttagttttccaggtttaatcgtgcgaagcattggcgatagtgacttgcgtgccacccatagttgatcgcgtgcggctccatccatggccacgtcaaggtcgatcagcccctcacccgaagcggcctgcgccagtgcttgtaatatatagggaagcgtgtcgtgattgccgtctccctcaatcagcagcatcgcgccggccataggaatattgctatcattgcgatacagcagctcgattgctttgtggtccatgaactccagcgttgctggtattgccggttgtgacatcagtcgtgacactgcggcagcggcagcggtcgtatcttgatagaacgcacgcaggccagcgatagcttgtggttgtggtgccagctttaacgtggcttcgacgatgattgctaatgtgccttcactgccaatcaacaaatgtgccagatcgtaaccggtggcgttcttcgtataagcaccgccacagcggatcacatcgccgacaccggtcactgcgacgacgccaagcacgttatctcgtgtcgcaccgtacttcaccgtacgcgggccaccggcattcgttgcaagattgccgccgatactgcacatcgctgtactggacggatctggtggccaaaaaagcccatgtggtgccagtgcttgttgtaagtcattgttgatcaccccaggctgtaccactgcgcagcgatcatctggaagcagcgcgacgatacggttcatacgtgccaatgacagaacgatgccgccatggagcggcactgcaccacccacggtcccagtcccggtacctcgtgggatcactggcacgcgatgttgacggcaggcacgtacgattgccactacctcgttgaggtcacgtggcagcgccactgcatcggcacatgcaaagcactgcgagtcgtcttcgctgtattggcggcgactgatggcatcaatgcgccagccttccgagcctaggagagtggacagagtagtgatcagtgcgtcgggcaattgagtgtccatcagaaacagagcaacacatcatggttagaaaaaagagtatccatttcatgccagcagcaaggctgactcattggagtctgttttgtggaatcattttcgcaatccattgcattcaaaggatagaatatgttgtccatatgcagaggcatgtccgtaggcttttgagatttaaagagtgatgaactcaatgaaaaacagcatggtgttatccgcattgcagatgtgaccccgggcatttgtaaagcatcagatggaattgattcactgcctgccaaacgactcattgccgataggtgttagaagatcggtccttggttatacaggggagatgtaaaaatcttgcaatgcgcagcgtgttatttggctacgttcccaccagtaggttgcactgttgccgcagttgggggaggggaatgtaaccacatcattgagtgtatgacttcttgacatcgcatcaactatttccattgaatcgtgacctgtgatgacaagtgtcttagcagcaatcttgtgttggctttgcttacttgtacatgtgtagcaggcatgaaaatgcaatacctcaattataaatcgcctttgattgcaacgaatgcattacctcatcaattaagcgctcatacagtcatcatctacaggtgcttgatgcgttttctcggcaatagcaacatgggtttctggtaaagaagtatgccgggattgcaccttgattttttccatttgaatcgcgatccgtatcgcaatgctggcttcaatatgattgatgccagtgtccagttacactagtgtttacgtgctgatgaatccttgaagagtgcttccatacggtgtcctcactgtcttccgggtcgattacgcaacacattcatcgggtgatccggcgtcatgaagagcaccgcgatcttccattgattgcagaatattgctgcttgagggtaatgagtacgcttgagtgattcgtacacacacgatgattgatatagatttaggtcagaagttctgattccttttgacccgatgcgcagcgaacgatgccattgcaaatgtgatgcatacaaaacaccatctcttaatcgagtgccgttccgcctgatccaggcgatagcccattattcgaaatggtgacgaaaaaacatttgaaatgtgcattatctatgtacacgattgatattctctttcgattaaacgatcctccctcctgatgcggggaaccatgaactgtgaagtgatccgcgcatctctatgattgtgaacctggataggctttatcgtcgcgggctgtcgcattagatgctatttgctgttgctcatagggtggcatagtcttccgaatatgacccatgtttccttgatccagacagatcacgccgcactcccgttggctgatgcgaaggtacctgattacttcctgcagctggagcgcatggctgctcatttaacacatgagcaattgatggcgctgcgtcgcgcctgggtgatgggtatggctgcgcatgctgggcagacacgtaaatctggtgagccgtatatcacccatcctgtggctgtggcttgtgtattggccgacttaggtatggatgtagagacattaattgcggcgatccttcacgacaccattgaggacacctcagtgacccgtgaaatactcgccgccgagtttggcgagaccgtcgcggacttggtggatggtgtcactaagttagacaaactgaagttccggaatcgtcaggaagcagccgctgagagcttccgtaaaatgttgttagcgatgtcgcgtgatttgcgtgtgatcatgatcaaactggctgatcgcttgcacaatatgcgcacccttggcgcgcagagtattgaggcgcgtagccgcattgcacgtgagacgctggagatttacgcgccgattgctcagcgtcttggcatggcactgatgaaatccgagcttcagaaccttggattttgtgcattgcatccgtggcgccacgccatcattgagaaacatattctcaaccaacctgtggtgcgccgtgaggcgatggaacgcgttgaattgcagttgtcccagcgcttgatacaagagggagtgcagcaccgtgtagtgagtcggatcaagactccgtggagcatctacaacaagatgcacgacgataacaaatctttcgaccaagtgatggatgtcttcggatttcgattggttgttaagagcgttgctgattgttaccacgcattgggtatcgtgcatggcactttaaaacctttagatggacggttccgggatttcatcgcgattcccaaaacaaatggctaccagtcgctgcataccgttctatttggcccatacggctccccgatcgaagtgcagattcgtaccgaagagatggatatgattgctgaacgcggcattgccgcacactgggcctacaagtgtggcagcgattcgccgaatagcgcgcagagccgcgttcatgcctggattgccgaattgctcgaatcacagcgcaccgcgatttcctcaatggaattcttagataacttcaaggttgatctatttccagatgaggtctatttattcacgcccaagggcaagatctttgctttgcccaaaaattccactgctcttgatttcgcttatgcggtacataccgatattggcaatcatgccgtgacctcccgggtggataaacagctgatgccactgcgtaccaaactctccagtgggcaaactgtggaaatcatcacggcacgctctgccttacccaaaccgcaatggttggaattcgtagtcagcagcaaagcacgtactgcaatccgccatcaactcaaacagcttcaacacgaggatgcagtacaactgggtcaccgcatgcttgatcgtgcgttggaagccatggacagctcgctggaacgtctgcccaagggtcgactggatgccttcctggctgaacatcactttcagcgcttagaggccttgcttgctgacatcgccttgggtaattggatgcctaatcagaccgcacaagcattgctgacttacacggaattgcttggcaacacgccgattgagcactcacacgagaaaattttgatcaatggtagcgagcgtggtgttatcagctttgcaaactgctgtcaaccaattcctggtgatgatgtgatgggctaccacaccactggaaaggggatcgttgtccatcgcctggattgtccaaacctgaatgaattgcgtaaatcacctgagcgttgggtgccgatcgattgggatttaaacgtttctggtgattacgatgcctcgttactcgtcgaagctgagaatcgcactggcgtactggcccaattagctgcggcgatcgcgcagagccattccaatattgaacatgttgactacctggagcgcgactttaatgcagccctactgcgcttcagtatccaggtgcgcgaccgccgtcacctagctgaagtgatgcgccggttacgccgcttgcccgcagtacagagtgtatatcgccaatagcctccatccttagataacagcctcttcactagggtgttaatagatgagacctgcacctcatgcgctctttctctattggctttcattggctttcgtctgcaactggagcattgctaccactgccttgtgattcgtacccagatgctgagattagtggcccttgagcgggcaccgatacaatgcgcttttattttccatcgactccacattcaaatgtccttccagaccatccataccgaaaaagcgccggctgcgatcggcccgtattctcaggccgtgcgtgttggcaacaccgtgtatttttcaggccaaattccattggatccagccaccggtaccattgtcgttggcgaccttgcggtgcaagcccgtcgtgcattcgataacctcagagcagttgctgaggctgccaacggttctctctctaaaatcgtccgtttagggctttacctgaccgacttggagcaatttgccgtggtcaatgcggtgatgcaggaatactttcaggcccccttcccggcgcgctccaccattcaggtctccggtttacccaagggcgcggatttcgaggtggatgcagtgatggtgatcgactgatcctgctatgccgcgtgcacgttcgcatgcccccgacttgaacgtcgctggcaatgccccattgtcggtgctgccgcgagttgggccggtattagctggaaaattcgctgcgcgtggcatcttcaccttgcaggatttgtggctactgctcccattacgttatgaggaccgtacccggctaaccccgattgccgagcttcaggatggggttgcggttcagatcgaggcccgagtggaagcggtggagcgtagtttccgttaccggccgctattacgcgtggtgttgaccgacgacgcacatcacatactgacgatgcgttttttccattttcgcgccgcgcagattgcgcggtttactgtcggcacaagggtgcgtgcgtatggcgtgcccaaacttggccaatatggttgggagattgtccatcccagctaccgcatccttgcccctggggaagatgtccggctcaatgactgcttggacccggtgtatccggtgattgagggtgtcgggcctgccatcgtgcgtcagctcatccgcgaagcgttggaacatttacctacggatgcagtcttagaactcttgccagacgtttggttgagtgaccttggcctgccaatgctgcgtactgccctactgatcatgcaccggcccccgctgaatacggatattgcccgattgatggtgggcactcaccccgcgcagcagcgcttgtcgttggaagaattgcttgcccaccaacttagcttgcgtcgtcagcgtattgcattgcaacgtcattccgctcccgcattgcctgatggagcggctttggtggcctctttgttgcacgcactgccgtttcacctcactgctgcgcagcaacaggtattcgcccagattgctgctgatgtggccaagccggtcccaatgctgcgtcttgtgcagggtgatgttggcagcggtaagaccgtagttgcagcattggccgcattgcttgctgtggagcaaaacaagcaggtggctctggcggcaccgacagcgttactggccgagcaacactttatcaacctgcgtgactggctggagccattgggcgtgcgtgtgcattggttggctgccaaggtgaccggcaaggcccgtctccaagcgctgaatgatgtggcctctggtgatgcgcaggtggtggtcggtacacatgccctgatgcaggagtctgtggtgtttcatgacttggcactgaccattgtcgatgaacagcaccgttttggtgtccatcagcgcttgttgcttcgtgacaaaggggccactgctggcatcgtgccgcatcagttagtgatgaccgccacaccgattccacgcaccctagcgatggctgcgtatgctgatttggatgtttcggtgattgacgaaatgccacctggccgtaccccggtgcaaacgaatgtattgagtgctgagcgtcgcccggaactggtggaacgtatccgcctggcttgcgctcaggggcgccaggtttattgggtgtgtacgctgatcgacgaaagccaaacggaagcagaacaggcaccccccagcagtaacgatattgagcatcgcagcgaggtacaggcggcacaggccacctatgaagcactgtctgcacaattgcctggtgtccgtgtcggactcgtgcatgggcgcatgaaggcagcggaaaaacagcggacaatgcgtgcattcaaatgcaacgaaattgatgtcttggttgctaccacggtgattgaagtgggtgtcgatgtccctaatgcgtcgctcatgattatcgaaaatgctgagcgttttggtttagcgcaactccatcagttacgtggtcgggtcggacgtggttctgttgtgtcaagttgcgttctgttgtatcagcccccgctgtcgatgctggcgcgtcagcgtttggagatcatgcgccagaccaatgatggttttgcgattgctgaaaaagatctggaattacgtggtcccggcgaattgttggggacacgtcaaacaggtcttgccgcgtttcgtgttgctgaccttgcccgcgatgcccatctgctgcctcgcgtgtattcgttggcgaacatgttgcttgacgaatcgccacagttagctgatcaagtgattgcgcgctggattggtagtgcggtgcgttatgcatccgcctgatgcctgttatctattgcacgtatcactgatctcccgatcccagaggatacgttcggtgcttttagcaacgttgaatgtcgcctggtaccgcactcaatgctggtggtgttgctgttttgcttagtgatacacctattgcagcaagattaaagagttttgttgctcttgagtacaaaaggcgggttgctgcgttatttactgggattgtgttgcggcgctaacgctagaggtgggtgactgcggttttagcgtcttctgaaaagagcaatcaccagaaaaaatcatatgcgtgttcattcgaacgtttggttaagtttgactaggatcaatgagcaacacagttctttagacgtgttgcgggagaagaatattttcgatctgcaaaatccatacaactgccttgttgattggagccacagcaccgcagagttgtgaaatatctggagaaacgcccactttaaacgtgatggatgttgggtaaatcgtattcaaaaattgcttcagtttgaatcatgaatgacacgacatccacgctctcattggaacgtcataatgcaggtccctccttcccccgcaccatctcgtgaaactcgccgacctatccagccctgcgttcttagaaaacccctatccactgtatgaaaccctgcgcaggcagggatcctttgtgagcatcggaccgaatgcattgatgacgggacgctacagcatcgttgatggactactccacaatcggaacatgggaaaaagctacatggagagtatccgggtacggtacggagatgatgcgcttgatatgccattgttccagggattcaacagaatgtttctgatgctcaacccgcccgtgcatacgcatctgcgcggcttggtaatgcaagcattcactggacgagagagtgaatcaatgcgccctcttgcgaccgatacggcgcaccgattgattgatgattttgagcagaaatcatcggtcgatcttgttactgaattttcctttccccttcccatgcggatcatttgcaggatgatggatgtggatatcagcgacgctatcagtctaagtgtggcggtgagcaacattgccaaggtattggaccctgcgccgatgtcgcccgatgaattggtgcacgcaagtgctgcctacgaagaactagcgcattacttcacaaggttgatcgagctgcgccgcgcgcagcctggaactgacttgatttccatgttgctgcgtgctgaggaggagggccagaaactgacgcatgatgaaatcgtgtccaatgtgattttgttgttattgggtggctacgagaccacatccaacatgattggcaatgcattgattgcgttgcatcgtcatccgaagcagcttgcacgactcaagagtgatttgtcgctgatgccgcaagcgatattggaatgcttacgttacgatggatcggtacagttcacgatgcgcgcggcgatggatgatgtgagcattgaaggtgatgtagtacctcgtggcacgattgtgtttttgatgcttggtgctgctaaccgtgatccggcgcaattcactgatccggatcatctggacatcacacggaagcaaggacgcctccagtcattcggcgcaggcgttcatcattgccttggatatcgacttgcgttggttgagttggaatgcgcattgaccgtgttgttggagcgtctgccgcatttgaggttggctaatctggatacattaagttggaaccagcggggtaacttgcggggtgtcaatgcattgattgcggatttgcattcatagaatccaatgaagcgcaatgagatgtagaaaatgcattgctgtattgatgtgctctacacagcggcaggcgtagtgcatgcacgatcgcgtaatgccctgatgttgcatctcatcctgtccatgcgtgcagatcgctggggcttacgtctggaggaatggagcacgtggggttattcatccactatatagctagcagccgaaataagtagattatgtaatggatgcaatgagatcggagtttggagtggctagtaatctatgagtatttaatgtgatgtctatcaatacttacctctgtttaatatttaatcatgatgtcattgaataatttttaaattaattatcatgattttttgagaatttctgcatgttttcagatttagaatcatgctattaattcatcaggtgcatgtaatgaaattaaatctcatgttttatttttttctattcaatataagttagataaagaggtgattgataatgatgtatggttctcaacgcaaaccggtgtttcttatcctgagttactttatttttatctgtgctctgttcccctgtgttgcagctgcttggccttcacgtgggatggtgattaacagaaaaattattggtagctatacgcagcgtcagattgctgctctgcttactgatgagccgccatccgagcaacccaaatgcaacgttcgagtggttgaaatgacgtatacaacggttggtgtggttggtgaaccgaccagggcatctggggtggtgcttgttccagacgggccacagtgtccaggaccttatcctgtgcttggttggggcagtgcgacagagacgttacgcagtgccgaacaggctaagggcattatttctgccaagggcgatgatccgttggtcacgcgtttagcgagccaaggttacgtggttgtcagcaccgattatcttggattgggtggatctaattacccgtatcatccatatctgcatgcgaattcagaagcctctgcgctgattgatgccttacgtgcatctcgtactgtattacagcatttgaatacgccattgtcgaacaagctgatgttgtctggcttttcgcaaggtggtcatactgcaatggcgacccagcgtgaaattgaagcgcatctgtcaaatgaattcagccttgttgccagcgcgcccatctctggcccttacgcactcagtaaaacgtttcttgacacttggactggccggaacgaagttggtgaaaacaattttgctatcattttaggcacttacgcgatcattggtatgcagcgtacttataaaaatatttacttatctcctacgcaagtttttcaagatccttgggctggcagagttgagacattgttccctggcaagaaagatactactgatctttttttaggtgatgatttgccggcgattgatcagatcaaagagtattttcaacccggattctatagcgactttccaaagaaccccaaaaatccattccgtgtggatctaggacgcaataatttgctgaattgggcaccacgtactccaacactgctgtgtggttctgacaacgataccgtcgtgccttttttgaagaacactaatttggcgatagcatcattcaagaagcgtggtagccgtcaagtgtctgtggttgatgttggcactggtaatcgtaaagacaatagtgcagtggcgcatctttccagtgaggaactttgtatcgttaaggttcgcaatgagtttctagagaagcaacgttagtggatatagggtttgcaaacgtacctagatacatttgatgatgtggtgcgtatgagatatccgataagtgatgcaaggatcgcatttaggtgtgtggatcatcgccgctattgttaatacattgatccggccttgatggtgatattgtgtaaccgtcaatcccaaggccggatccactagtggcgcaatagacccgtattgcaagagcttcgtattgttggagttgttctatttcataattgatgtcccgttatgcccccgattcgggggctttttttgtccttccaaaatcttacacatgaatggttgtgactttctttttgtaacatccgttgcatccgttctggatacattaagttggaaccagcggggtaacttgcggggtgtcaatgcattgattgcggatttgcattgatagaatccaataaagcgcaatgagatgtagagaaggcattgctgtattgatgtgctctcacggtgaattacggcctttggatcgcgtcagttcatgaagctattgcttggcaatgcctgacgatatctaggacgtttttaaagaagtgccatcacgccaaaatatcgttacacagcggcaggcgtagtgcatgcacgatcgcgtaatgccctgatgttgcatctcatcctgtccatgcgtgcagatcgctggggcttacgtctggaggaatggagcacgtggggttattcatccactatatagctagcagccgaaataagtagattatgtaatggatgcaatgagatcggagtttggagtggctagtaatctatgagtatttaatgtgatgtctatcaatacttacctctgtttaatatttaatcatgatgtcattgaataatttttaaattaattatcatgattttttgagaatttctgcatgttttcagatttagaatcatgctattaattcatcaggtgcatgtaatgaaattaaatctcatgttttatttttttctattcaatataagttagataaagaggtgattgataatgatgtatggttctcaacgcaaaccggtgtttcttatcctgaattactttatttttatctgtgctctgttcccctgtgttgcagctgcttggccttcacgtgggatggtgattaacagaaaaattattggtagctatacgcagcgtcagattgctgctctgcttactgatgagccgccatccgagcaacccaaatgcaacgttcgagtggttgaaatgacgtatacaacggttggtgtggttggtgaaccgaccagggcatctggggtggtgcttgttccagacgggccacagtgtccaggaccttatcctgtgcttggttggggccgtgatggacagacattccgtccctctgaacaggccaagagtattatttctagcaacggagataattcgttagtgacgcgtttagcgagccaaggttacgtggttgtcagcaccgattatcttggattgggtggatctaattacccgtatcatccatatctgcatgcgaattcagaagcttctgcgctgattgatgcgttacgtgcatctcgtactgtattacagagtttgaatacgccattgtcgaacaaactgatgttgtctgggttttcgcaaggtgctcatgctgcaatggccgctcagcgtgaaattgaaatgaatctgtcaaatgaatttaatcttgttgccagcgggcttatctctggcccttatgcgctcagcaaaacgtttattgacacttggactggccggaacgaagttggtgaaaacaatttcgctatcattttaggcacttatgcgatcgtagggatgcagcgtacttaccgaaacatctactctgatcctagtcaggttttccaggatccttgggctaaccaggttgaggcattgttccctggtgaaaaaggtaggcgtgaagttttcgattatttgcccgatgtcaagcagataaaacagtatttgcaacctggattctatagcgactttccaaagaatcggaagaatccattctttgtagatctagtacgcaatgatctgctgaattgggcaccacgtactccaacactgctgtgtggttctgacaacgataccgtggtgccttttttgaagaacactaatttggcgatagcatcattcaagaagcgtggtagccgtcaagtgtctgtggttgatgttggcactggtaatcgtgaagacaatagtgcgggggagcattttttcactgaggacccttgtattcttaaggttcgccagcaattgctggataagcaacgttagttgatcggtctggtaaatgtaccctgataattttcattgtgtgtggcgttgattctgttgtttagatcatcagatatccgataagtgacgctaggatcgcactcatagtgtcttgatgatggtcgatattgttaatactttgatcctgccttggtattgatcgtttccaaccgtcaataccaaggcaggattgatttattgtagtggtgcaagagatccgtacggttgtagttgttctattgcatcattggtgtccggtaggctccccattcgggggctttttctgtgcctctaaactttagatatgaatggctgcgactctttgcgttgcaggggttgtatccgcgcgtgggtcacgcgtcatgaggtggctgtttgcaaacgcgcgtttagtgagtcgacaacatccggctaactcatgtggttagtgtcgtctaccagggcgtacgcggtacggtgccaggcatcgtgggaagagatcacaagtgttgtaacggagcggttttgtctgtcttgttgtcgcaggcacgtgtgacaggtgatgggctgccatgtcttcatctggctgatgagtgtgtgatggtttggagtgttatgcactgactgtcaccggtttatccacaggattgtaccttggccgttgctgcggtactgactatgcttcaccccctgttacacagtactaggccgttgttttatgtctgctcgtcccggcttccattccaattatcaacgcgagcctggcgatcgtgaagcgctgcgtgttgatccgttgcgcgtccctcctcactcggttgaggctgagcaggccgtattgggggggctgatgttggcgccggatgcgttggataagatcaatgatcggttgacggagaacgatttttaccgtcgtgatcaccgcatgatttaccgtgcgatctgcgatttgtccaggaagatgcgaccattcgatgtcgtcactctaggagaatggtttgagtcgcaggggatgctggaggttgttgatcatggtgcttatttgattgagctggcaagtaccacgccctcggccgccaatatcgttgcctatgctgaaatcgtgcgcgataaggcagtactgcgtcagttgattgaggttggaaccaagatcgttaacgatggattccaaccagagggccgcgaaagtattgatttgcttgctgaggctgaaaagtcggtgttcggaattgccgagactggtgcgcgtggtcgcattgattttgtggcaatgcctggtgcgttgaaggatgcttttgagcagctgcgtgatcgttttgagaacggtagtaatgtgaccgggcttccaaccggatataacgattttgacgcgatgagcgcaggtttacagccgactgatttgatcgtcttggctgcgcgtccggcaatggggaaaacaacctttgcgttgaatatcgctgagtatgttgcgattaaatcgaaaaagacggtggctgtattttcaatggaaatgtctgctgcacagttggcgatgcgcttgatttcttctaatggtcgtatcaatgcgcagcgtctgcgtacgggtcagcttgaggacgaagattgggcacgtgtgactggagcaatcaagatgttgaaggagactaaaatttttattgatgatacccctggtgtgtcgccagaggtattgcgctccaagtgccgtcgtttgaagcgtgagcatgatcttggtctagtggtggtcgattatctgcagttgatgtctgtccctgggaacagtgagaaccgtgctaccgagatctcggaaatttcgcgctctctcaaggggttggctaaggagttgaatgttccagtgattgcattgtcacagttgaaccgttctttggagacgcgcactgacaagcatcccgtcatggctgatctgcgtgaatctggtgcgattgagcaggatgcagacatgatcgtttttatctaccgggatgagtattacaacaaagattctccggataagggtttggcggaaatcatcatcggtaagcatcgcagcggcccgacaggttcgtgcaagttgaagttctttggcgagtacacccgtttcgataatctggcccacgactcaattggcacatttgagtagtacggtgttgctggagatctacggggctaaatcggcgcatctatccttgcgacactcttggttgcgcgttgctacgggtgcaatagacggtgtgtagtcagatggatgggattgcggtatgagccgtagcggtgactcgcttaatcggaagctgggtggctgcagggggaatgatcacgccttatagcagtgcttgcgttgttatgaacggatgtgcactgctgcgatgggtgccaggcgttgttgttgcatcgtattgggtgtcatcggtgttctgttttttgttgctgtttttttgttttggtttggttcttttctgcgttgcttccaagccgaatgtgcgtgtgatgattgattcgaccgttttccgggtgtaacggtacacggtacagcgttgcgggaaaaggattgtctggatatcaggattcgagcagtaggtgtgttggataggctgattggattgcctcttgcagtggggtggtgtgtcagatgagtgatgcgccgtacatcaatgactgtactcaaggatgagtgtcatgctgtggttacatggttgataacattgttgtagtctgattgttgtccaggtttccatcacccagttgatgtatctctgtgtttatcttaactattggtgagccggatgtgccggcgaaggagtaatgatgatgatgcgagcggcccttaagccgatgtgtacagttctggcggtggcgctggtgctgtccggttgtgctacaggtggatcttatgtgcagcgtgaccagtccggtaattccaccgagcagcgaaaccggaccgggcgggatgcggccattggtgcggccattggtgcggctgcgggtttgttgactggtaaaaatgccaccaagcggagacagcgcgcgatgattgctgctggtatcggtgcacttggcggggcagcgattggtaattaccaggatcgtcaagaacgcgctctgcgtgagcgcacggccaatactggcattgatgtcaagcgtgacggtgacaatatcactctcaatttgccggacggtattactttcgattttggtaagtcgatgctcaagccgcaattttatggcgcacttaaaaatgtcgcttcgacgttgcgcgagtataaccagacgatgattgaggtggttggttataccgatagtattggcagtgatgtggtgaatcagcgcttgtctgaagatcgtgctggtgcggttgctagttatttagcaggacaaggtgtgcagcgtgagcgtatggaaatctcggggatgggaaaacgttacccgattgccgataacagtacagaagctgggcgtagtaagaaccggcgtgttgaaatacatttgattccattcagtgctgaaaatagcggtgccacaggcatgcattgagtctgtattaactgcttgtacgctgtatgttgcttatgaagcgcgctttttgagtatttatctgccgtagtttggatttcctctggatttgtttgttgttgtcatgcaagcgaatccaggggttcctttgaccttgggttgtgtgactgtttcgcaggatgtggcgtgagtcgatgtgttggattgtagttgagtcgtatttcactctgaggcggagagtgatgtatttttttgaatatccaaagtgttcgttggtgaaatgaggtgtacttgaatacatctttgcgatccttattgttgatcttgtggaataaagatttaaatttttagtattactgtaggccgtgtttcgaatcagcggttttttgagtttgattgatgctctcaatactatgcgttgtgtagaggtccaggggatgttattccggtggtttcaaaggttttgttatttcaatcaagttgactgaaagagagtcgttgtcgactggatcatctttaagaagtggcgggtggtcttattctggtcattggtgatcgtgctatatacggtgtattgcaatgagcaggatgccagtgtcatggatttttcgatgcttgggcatgctctgctgtagacattaaagtcagcgatccagattaaaagtggtcgccatgtatccatagaaacgatgggcaaagcagtgttgtgctggtgatatcttctttttcgctatttatgtctcagagcaacaatgtttttgatgctggtttgtgtcgcatcctttgaaaatttgtgttgtacagtgtgctggcgcaacgtggttgtgcggcatgtgctgtaggccagcggataggttgtctccttgcttgacctgagcacggcagagccgtaggacatggtggaaccactccaggaatgctgtattggaatcacttcgatacagcgctgcgtcgctgccgaccatatgtgattgcaacgctatgatttgaggtgcagctcagctgtataagtgattgcgatagcgatagacgcaagtcaggctgcaatgggagcgatgcaatgcccacgttgggttcgttgaggtcatacaggtgatgactttctgtgctcaggatgagtgggcagccagatgcgctcgccggggtggtgagtcattgcactctctactttatttcgtgcctgtttagtctggggtagtcgttaatattggcattgatacggctccaccttctgtttcggtcgagcgcgctgcatagctattggcgaggcgtatgtgctggataaacgctgtgtttggttgccgtgccagggatgctgccaaagcaccattaaatgcgtcgccagctccggtggtgtctacggtgtgggcctgttcggcggccacgcgatagtagggctgggtgtcaccacgcaggttttcttccgagtgtgaaacgaatacgccagctgagcctaatgtaatgacaaccgtactgtcggacagtagcttgttgcataaggcatgtagtgtgttgccatcggtggtggcgacgttgtcgggactgatcctttcaccgacgtgacggctgagcaaggcgacgaattccgtttcgttgagcgtgagcacgtcggccaatttgagcaggttgatcgtggcggttgcattggcgggggcagcattgagtatggtcaagcggccagcttcgcgcgccatgctgagcgccgtttcgagtgtttctatcggtgattccagttgcgccaagatgatccatgctgaggtaattagggcgcgttgttctgtgatgaagtgggtgctcagtactgcgttggcaccagcgccagtgacgatggtgttatggccgtggctgtcgacatagatccctccggtaccagtgggttcggtgctggattcgccgatcagtgtgaagccgtcttttgtggcgatgtcgcgtgccatgttgccgtcggtgtcattgccgagtgcgcatatgaaataggtgcgtgcaccaacgcggcaagccgctacggcctggttgaagcctttgcctcctggaccacggctatagcggccggcaattgttgcaccaggtgtgggcaatgtgtcgcagcgccaaacatgatcaatactgaaggagccgacgacgacgactgaatgcataagaacctttaaatatggagtgtgagttagacaaggtgcgacaacgtattgtccatgttagctgtcatgagggtgatgatcgagacattgagcctaatacataggtctaatgtgatcagatcgtgacggagcgctgatgtttggattcccgattagggagatatttggtgaaaaattgatgaagctacgcaattcgtaagctggttgcagggggcacttaacctgcaatgggatttcgggtgtgagtggtttgcagggatcgggcggtggttaggtaagaatatccagttgaggttctaagctgagtggggtgaagtcgattcaattcaattcaattcacacgattggtcatgtgagaatcgttggttgcggcacgccgggaagctttgagcaagcggcttgggggagtgaagacgatgtttacttagcagtgctgtgtgttgttgttttctttggttgttgcatgggttgtttgttgattctcgcgtcctttagggagtggagttttatgcattatcgtcgtcttggttctactgggttgcagttatcagttctttctttcggtacttgggtgacttttggcaatcaggttgcgcgcgatgaggctcgtaatttagtggcttgtgcttgggatcacggcgtgaatttctttgatggtgctgagaactatgctcaagggcgtgcggagcaggtgttaggggatgtgattgccgacttgcgtttgccacgtgatggttattgtgtatccagtaaggtgttctttgggcctgtgaaggagccacgtccgacgcagtgtgggctttcacgcaagcatgtccatgatgcttgccatgctgcactgaagcgtttgcgagtggactatttggacctttttttctgtcatcgccctgatgctgatactccgattgaggagacggtacgtgcgatgactacgctgattcggcagggcaaggtgctttactggggtacttcggagtggtcagcggcacagattgccgaagcaattgcgattgcctcacgtgagcatcttgagcgtccgtgggtagagcaacctcagtacaacttgctacaccgtgagcgtgtagaacgggagtatgtatcgctctatgctcagggtttggggacgacgatctggtcgcctttggcatcggggttgctgactggaaaacacaatgtgggtgtggcatcgggtagccgtttggtgcatccaggttacgagtggttacaggggggtgtgttgggtgagggggaggcacgcttggtacaagcgcggcgctttagtgaggttgctgctgatcttggccagccgccggcgcaattggcgattgcttggtgtttacgtaatccacatgtctctacggtgattctgggtgcgagtcgggttgctcaattgaaagaaaatcttcgggcattgcaggtggttgcagcattggatgctgctgcttggcgatgtgttgaggctgcaatggaatgagtgatccggacctgatggagttgtggtgcatgtcggtattgggaggttgactgtgtattccttggttgggatgtttcattcatatcggtattgctgaggttgaaagtgtttctctgctaagtgtctcgagtaggagtttccgaaatacggtatttgatcaagatgcatcgctctattgggtactctgtacactgcctttcatgatggggaatgtctttgctaaatgctgttagagggcagttggttttttacctaagtgagattttgtcctacgtaatgaatgtgtgttggctcggggcagaatcagaagatgtcaaaggtctgttcatcactttcttcttcatgcaacttgaaatcatgatcttgtaagtggtttatatcttcgttcttgacccattcggttgctccgttgagtgtggtttgagtcatgccttgaggggggacgttgcgcgcgattggtttgtccttcaatgcagtgcgcatatattcgatccagatggggagtgctgctttgccgccatactctctgtaaccaagtgactggaagtcatcgcgtcctacccatacggtagttacgtaaggtcccccaaagcctgagaaccacgcatcacggtgttcgttggttgagccagtttttccggcgatgtcctggcgattcagtgagcgtgctgcggttgctgtaccgcgtagcaccacgtcgcgcatcattgataccaattggaagacaacgcgttcatcaatcgcgcgcggtgccattggggtgttgggatccggtgaagggatggtctggggaggttcgttgttgttttttactggtttggatggttctgttttggtgggtgcgccaaagttgaatccgtccactagctggctggttgattgagtgacgttggtgttggccgacgtgcagctgcgacaggctaccttaggggtgttcttgaagattaatttgtgttctctgtcgtgtatctcgtcaatgagccaagggtcgatgcggaagccaccgtttgcaaatactgcgtaaccgcgcgcgatcgacaatggagtgagtgaggctgtacccagagacattgataagtttggaggaatctcgttttcctcaaaaccgaattgggtaatgtagttgcgtgcaaaatctacgccgattgcgtcgagtagtcgtactgatactaggttgcgtgattgaaccagggcgtcacggatacgcattggaccttggaatttgccgtcatcgttctgtggcgaccaggtatggccgcggcggtcgcggaatatgacgggtgcatccggtacgatggacgctggattgaagcctttttctaatgcggctgaatagacgaatggcttgaagctcgagccaggttggcggcgtgcttgggtggcgcgattgaatttattagcggtgaagctgaagccaccgacgagtgcacgtagtgcgccattgttggcatctagtgagaccaatgtggattgagcgctgggtagctgttctaatgtccattcaccccatttttccccaggccggacccgcaccacgtcaccacgtttgaggagtttgttcagtggggtgccggtccagcgcgcggctgccggggggagtgtcaattcgctgcgatcactacgtaccacgacggcgctgccttcgggagtggtacgtgccacgatcacggggaacatcccaccttgggaggaaatgcctgacaggtgtgcagctaatgtagctgtgtctgcgtttgcatccacttcgatatgttgttcggcacctcgccaacggtggcgatgttcatataacgctaggccgttgcgtacggaagtttcggcggccatttgaagtgtgccatcaatcgtggtggtgacgtgatagcctttgttgagtgcggcaccaccgtatttggcgatcatttcctgacgtaccatttcggctgcgtagggggcgtatacctggacgggtggttcgtggggtttggcgtgcatcggtattgcttttgcggcattggcttggtcttgggtgatgaagttaaggtcgaccatgcgttgtagtacgtataaatcacgccgttcgcgggcacgagccgggttggtaatcgggttgccgctggatggaaacttggggatcccagctaaggatgccatctcatcaaggttaagttcgttgagtttcttgccgtagtaaaactcggctgcagcagcgatgccgtaggcacggtttccgaaaaaacttttgtttagatacagttccaggatttcgtctttctttaactgcgactctatttttcgggctaatagaatttcagccagtttgcgtttatagctgtattccgagttgagaaagaattggcgggcaacctgttgagtaatggttgaaccacctgggacacgtttttcgtttgttgtcgctagtagccaaattgcgcgtgcaatccctttatagtcaatgccgctgtgttcgtagaaacgagcgtcttcggttgctaggaatgcttgtttaagttgctcaggcacttccttaatctggacagggtagcggcggatttccccgaatatcgccatcaacaggccatcgtgcgagtagacgtacattggttcttgtagttcgacttgtttgaggtttcgaatgtcgggcagtttcgaggaaatggcgtaatacataccgcccgctgccaggatgccaacgagtgtgaggatgataagtatggtgaggagccacccaagccaaccgcggagacgatacatatttaaatcgatattggattgcgaattttttgaccgtagagtatagatgaccctaggctttggcattgccttagaattgctaatggttaaaaaaacaaatgcaacgcacggcagtgttgtttgctatgtgatgcattgcaagttattgtgtgccgcagttttatatttgaatttaaagtacctgggcgcggaaacagatatgttcctgtcttaaaagtgcccgtcgtcaggggagttttcgtggggcttttttccaaaaaacagtcggtattggttggtgtcgacattagttcaactgcagtgaagctcttacagctttcccgcagtggtaatcgcttcaaggtggaacactatgctgtggagccgctacctctgaatgcggtcgccgagaggggtatcgttgaagtcgagcaggttggtgaagcaatccgtcgtgcggtgagtcgttctggaactaaggccaaatttgccgctgctgcggtcgccggttcggcagtgatcaccaagttgataccgatgcctgttggtctggacgagcaggatttggaagcccagatagaaatagaggctacgaattacatcccgtaccctattgaagaggtcagcctagatttcgaggtgcttggtccggttcccaacaacacggagatggtccaggttttgcttgctgcgtctcgttcagagaatgtcgaattgcgccaatctgcgttggagttgggtgggttgactgccaaggttattgacgtggaggctttagcggttgagaacgctttctctcttattgcccaagaactgtcggttgggagtaatgcattggttgcattgatcgacatcggtgcaacgatgtcgacgcttaatgtgctgcatagtggtcgcagtttgtacacgcgcgagcagctatttggtggtaagcagcttactgacgaagtgatgcatcgctatgggatgacttacgaggaggctggtcaggccaagcgtcaaggaggtttgccgcaaagctatgaggttgaagtgctgggatcatttaaggactctgtgatccagcagatcagccgtttattacagtttttctatgctggcagtgagtacaaccgagttgattgcatcgtgttggcgggaggctgtgctgtgattgcgggtttgccggctatggtcgaagaacggttgggtgtcgttaccgttgtggctaatccgcttgcgcagatgactttaggggcgaaagtgcaagcacacacgcttgctcaagatgcacctgctttaatgattgctactggtctggctttgaggagttttgactgatggccagaattaacttattgccctggcgcgttgagcgccgcaagcagcgtgagcgtgagttctatatgatgcttgggttttccacattggtgggtatcctcgtttcggcacttgtgtggttctattatgatgcgcaggtcagtggtcagaatgatcgcaacgcattcttggcttccgagatagagggcgttaaggcgcagaatcgggaaatcgaccaacttgacaagaagaaagagcatttgctggcgcgtaagaaagtgattgaagagctgcaatcaaaccgttcgcaaatggttcatttattcgattcgttggcacgtaccatcccggatggtgtggttctgaccactattaagcaagaaggtaatagtgtgactttgcaaggacgctctcagtccaacgtgagagtcagtacttacatgcgcaatattgaggggtcgggatggatgactaatcccgatttgtcgattattgaagccaaggaacaggataaaaacacgctcattgatagcagggcgctgccgtacgtattcactatcaaagcaaaactgtccaagccggagtcgacagatgatgcccgccataggcccatatctcctacttctggcaaagccgttgtggcgccgtctgctgattttaagccgctgtcagaggccaattgatgagtaagaattcgtttaaattgagtgatcttgactttaataatattggtgcatggccacagaaggtcaagatggttttctgcatcttggtcggcttttttattgtcatcatggcttggttcctcgccatcagcggcgagcttgagaaacttggtgtgcttgaaggtaaagagcgcgagctgcgttcggaattccaaaagcagcaggaacgtgctgtgaacctgcagccattaaagcaacagttggtgcagatggaagaggtgctgaagcagatgttgcggcagttgcctagtaagaccgaaatgcccgatctgattgttgacatctctcagactgccttatctagtggcttggtgaatgagctatttcaaccaggtgatgaagttcttaaggagttttacgctgagaagccgatttctttacgtatggttgggagctatcaccagtttgctgcttttgttagtggcgtggcttctttaccgcgcgtagtgattttgacgatgcatgatatgagtctcaaaccgaaaaccaataagaacaatgtgtctacgcgaggtttgcttgaattgtctggcacagtcaaaacttaccgctacttggatgatcaggaaatagttaataaggagaatcgtactgctgatgctgcgagcaagaaggatgcaccatgagtacaaaaaccctcaaaaaaatagtcggtttgattgttctcttggtattagtcggttgcatacgtagtgtaaccacctcgtttggcgatgtaccagatttgaaaaattgggtgagtgaagtgcgtgcgcgtcctgctccacctctggaacaactaccagtgatgcagcagtttgaaacctttgagtattctgcgcagggaatgcgtgatccctttagcgacgcttgggttaatcctgaggggggcaatgggttacgtccagatccgcatcgacgtaaggagccgctggaagcattcccacttgatacattgaagatggtgggtacgatcggcaggggtgctggtttggttgcagtgattactgctcctgacaaagtcacttatcgggtgcgtcgagggatgtacatcggacagaacgatgggcgagttaccaaggtgaatgaagatcgcgtcgaacttgtggaacttgtttcaaatggcgagggaggatggttggaacggccagccgcactttcgttcgacgattaatgattgatttaagggatagtatgatgactttatttgaagtcttaggcttgcgtttttttaggcgtatagcctcggtccgcgtatgtgcaatttgggtatgcatggctttcgcttggtgttgcatcgtaggaacggtgtcggctgaaaacaagcaagcgattccagtgcctaaagttgccaatgcgccactaagcgtttccaagatcgatttcaaacgtggtgatgatggctctggccgtctgattttgaagtttgatgggcagggagccactcctgacctgcgtacgcagggtggcaccgtgctggttgacctggggacagctgtgttgccgactgtcttgcaacgccagatcaacgttgttgactttgctaccccagtgcagcgtatcgacgctaagcctatgggtaagggtgcacaacttgtgttgagcacaaagggagcgtttgagtcgcttgcttaccagacaggggatgaatacgtggttgaaattgtgccacgcaagggagaggctgccatgggtggggcgatcaccccagaatcggtcagtaagtccgcagcgaagatttccgcacaagggtacagtggtcgtccagtaacgtttaacttccaagacgttccagtacgaacggttttgcagttgatcgctgatgagtccaatctcaatattgttgcttccgacactgtgcaaggcaatgtcactctacgtttgattaatgtgccatgggatcaagcgctcgacatcgttttgcgtgctaaaggattggataagcgccgtgatgagaaagtaatttgggttgcgccgcaacaggagcttgctaaatacgagcaagaaaaagaggacgcgcggatcgcgattgaaaatcgtgaggggttaattaccgattatgtccaaataaattatcattcggccacggtcatttttaaggcactgacagaagccaaaggtatgggtggggggggtaacggtacacctaataataatagtgatgatgctttcttatcgccacgtggtcggcttgtagctgatgagcgcactaatacgttgatgattagcgatattccgaagaaagtcgcgcaaatgcgtactctcatccagcatattgatcgtcctgtggaccaagtgttgattgagggccgcatcgtgatcgctaccgatagcttcgcgcgtgatttgggggccaagtttggtgttggtgctgctagccgtttcagcgataacactgcaacgatcggtagtcacgtcactactgctgatagctctacatcggctacgcgggggcttaatgttgacttgggcggtccgaccaacaccactgcttcagttctcccgagtttagcctacactttgcttggacctaaatttaatctagatcttgagctttcggcattgcagcaggaatcccgtggcgaggtgatttcaaacccccgtatcgtcactgcaaaccagcgtgagggatatatcaaacaaggtaaggaaattgggtatgtcacgatcactggaggagtcgctggtggtcaagccactccgaatgtccaatttaaagaggctgttttggagttgcgtgtgaccccaacgatcaccaatgacaaccgtgtgtttctcaacatgactgtcaaaaaggacgagattgatcaaatgattacgatcgccaatttcggtaccgtgccgaccttgaacaagcgtgagatcaacactgccgtattggttgatgatggtcaaactgttgttatcggtggtgtatatgagttttccgaccgtaatagtgtgagtaaggttccgttcttaggggatgtgcctttccttggtaatttgtttaagaaacgtggtaaagataaacaaaaggccgagcttttgattttcgtgactcctaaggtgttgcgtgtggctaatgctactgctgcagtgcattgaatttcgtcaatgcactgctttatatctttgaagtaaactcttgttccagttcgtgtcagtactcgtgttctcattgttcaattcgagtgttgccacgttctctgtgggaatttcagctaagtgtttctaatggaatgaacaggtgaatatagtccttcttaattgtggtcgctgtatttaataagcgattcaatgaagggctattttttatgtatggtgcttgcatattctgttatatcgctatttttgtgcggcattgtgttgataaaattctgtggcgtggattgtttcctgcttcttgcatgagctgaaatcaattgggcgactaataataattctcataatagacacttgtgaatgatcgtgtcttatcccgaatctttgaattgaagattctaaaatgggtatgtgaggatgggattaatggggtaattatttatttatgcggaattctcttttgaaataaaatcgatttaacggggttgtattcaatgtaatgcttaagagctttaatggccataggaaagttggtggttatgctgagtgaaaataatattgatccgaagatgatttaatgtcttagttctcattttgatgaatggaaatctattggtttctcaacttattgaagttattaacgcagcataggatgctgacgtgatgtttcagctttggggttgatgcacttgactcgctccgtaaatatcatgatgtttatattattcgttgatgttcgagaagtgcgaattgtggttaatagggacttggattagttattgagttcggtagccgccatctacgattggaacatgtgctgggagtatccaattttttgccctgtttgtggtgccaagagtttcgagttggtgtatgtgtttaagtgtgagcgttagtttatgcaagctcagtgacttagagtgtgagggtaatagagttagattaagtgccgttagatagtgctattggtcattaaatcctcgaaaaaatagtggataggtcgtgtgctattgatgtgctatccgatagttattcgtgcaacgcggtgactattttggctgatagctgtgagcgattgttttttatgcttgtaatgtgagttgctttcatttcagtcgcatttgctgatttgaaaattctttatgtgtgatttttagatgcaatcttagagaagggcggtaattaatctgtatattcttcaatcaagagataatgtgtgtaatctattggtatggctatcaggttgccgatgttgctgtggcgttatcattgaaattcagattgtttctaatttttctaatttgaatcttcgttaagtggcattcatctatctgtgatgtccagcatttatatattgtgtctaataggcattgacttacatgaattcgattttgtccatacgcatcaaccaggctgcgtgcatccaggcccgtaagtttctattttttcatctttggttgccgttagttggggtgatgttgttttctggtctgttgatggggttggcaggcgatcagtggctagctgacttgttgtaccgtctcgaaggtggacagtggttgcttaagcagcattggatcaccgagtatcttattcatcgtgttggtaagtggcttagtatcgttgctgggttgtgcttattgggaggtatgttagtgaggtgtcggggagggctggcagggtgtcgttatttgcgtgcgtctttgtatgtcgtcgtgacgttggtactgtctactagtcttatttcattggtaaaacgtcttactggtatggattgtccttgggatttggtgcgttatggtggtggatttccattcattggtttgtttgagagtcgccatggtttgaaggcgtcaggctgctttcctgcaggccatgctagtgcaggttatgcttgggtgtgcctgtattttgcagcgtggggggtgtgtccggcttggcgctggttaggtttaatgattggtttggttgctggtcttatttttggtatttcacagcagttacgtggtgcacattttctttcccatgatctatggtcactgaccatctgttggttggttgccttgggttttttctacctcttttttgtttctcccacagtaagggtagtctctgcgcaacaaagggcaatgacatgagtttttcaacattggttcttgtgttacggcgtcggatgagtgagtttaactggcgtgtgcgcccggaagtttctactgagagtgtagtgctcggtactagcctgttctttgcacttgcttgcaatacgatgttctggcgaagtgcgatgagtaccgcctcaggaagtatcggttttgtcctttcgcttttagcgttgttggtgacggtacatgcgttgctgttgggcttggtggtgtggcggtggagtgcaaagccattgttgactttgttattcgtgattacggcgtttgctacgcattacatgaatagctacagcgtctacctggacgcggacatgctgcgtaatgtgttcaataccgatcataaagagtctcgggagctgataacttcagcgctaattttgccgttgctgttctatgcgggggtaccaattgcggtgttgtggcggctacggtttcgccagcgaccttggtctcgtgcgcttggcctacgcatgttgtttttgctgatagttattgtggttggtgccggtggtgcgatgctgtcattccaaaaattgtcggcgttgatgcgtaatgatcgtgaggtgcgtcatttagccacgcccatcaattacatcatggcgttgcgcaagatgttgagcaatgattcggttttgaagcgctctcccaagttgccgattggtgaagatgcggtggctaccccacgtataccaagtagtcgtccgcgtttgttagtaatcgtagttggtgaaactgccagggcgcagaattgggggctgaatggctacgtccgtcagacaactccgcaattggctcagaacgacgttatcaatttcccagatatgcactcgtgtggaaccaatactgaagtttcggtgccgtgcatgttttcaccgtatggccgtcgcaattatgacgagagtaaaattcgtgggcatcagtcgctattacatgtgcttgagcgtgcccgaatcagtacgttgtggcgcgataaccagtctggctgtaagggggtatgtgatggattggagttgcagcagttagatgatgctaaagatcccacgctgtgcactagtagtggtcgctgtatggacgaaattctactgaaggatttcgtgtcgcaggtacgcagtaagttgggggatcgggtggtggtgcttcatcagcttggtagccacggtcctagttattttcagcgttatccagttgcgttccgtcaatttagtccgacgtgtgagactcctaacctggggagttgcagccgtgagcaggtcgttgctgcttacgataatagtttgctttataccgatcactttcttgtccggacgattgggatgctgcgtgatatgtccgactacgacacagcgatgatttatttatccgaccacggtgaatctcttggtgaaaagggactttatttgcatggtatgccatacgcaattgcgcctgctgagcagacacgagttccgatggtgatatggttctcgaagcagttcgttcagtcacgtcagatagacttgagctgtgtgcaccaacgtgctcgtcagtatgctgaccatgacaatctattctcatcggtgctggggttgatgcaggtcaagacagcgctatatgagcgcccccatgatctgtttgccacatgcgagaaatgagggggctttatggttgttcatgtctcatcggactaaatctgaaggagtcatcatatcgttttatgatgtctgtttatgcactaaaaattttatgatctgtgcaggtactagctgcatcggtatttcatgcgcgttatatcgtgtcatgaattgaaaagatttgtgatgtgatctgcggttggagtctcccttagatttcaggtgagcttgttgctgtttagtcgacgatcaatcaataggaaagcattcatggtttgctctctggctttgacagatccagtcaatatgtttgcaaatttacaaaaaatgatttagaggttttcatatgcctcttctgcaagaggctcggtgagcaatacaatgagatcgtcaagtgtgccaccgtagtgtgcctggatacgttgaagatctaagcgtattctacggagcttctccaataaataagaaaaatccgtaatacgtgatagtctcactagtcatcagtcgtcatctataacgattaaaaattaagtgttgatctcatcgtttaataaagttgcaatggcatgatcctagcgggtggtggcagtttaataaggtctcatgatgtgcatcacttttgtatgtggtgtgcctagtttttcgcatgcaaatccacaatcaatgtattgacaccccgcaggttgctccgttgattccagttcaatgcatccagatgagcgagccttaaatgcggtaggcgttcaaacagcgtagtcaatgcacattccagttcaatcagcgcaagccgatagccaagacaatgatgaatgcctgcaccgaatgactggaggcgtccttgcttacgagtaatatccagctggtcgggatgagtgaattgcgccggatcacggttggcagcaccaagcatcaaaaatactactgtgccacgagggaccaactcgccttcaacctctatatcatccatcgccgcgcgcatcgtgaactgtaccgacccgtcgtaacgtaagcattccgataccgcttgtggcatcagtgacagatcactcttgaggagtgcgagttgctctggatggcgatgcaacgcaatcaatgcattgccaatcatattggatgtggtttcgtaaccggcgattaataacataatcacattggagacgatttcatcatgggttagtttctcgccgtcttcctcagcacgcagaaacatagaaattaagtcagttccaggatgggtgcggcgtagctcaatcaacttcgtaaagtattgcgcaagctcttcgtaggcagtgcttgcgtgtactaattcatcggccgacattggcgaagggtcgaataccttggcaattttgctcaccgctatacccagggtgacggcatctccaatatccacatccatcattttgcaaatgatctgcatgggaaagggaaaggcaaattcagcaacaagatcaacggatggtttctgttcaaagttgtcgatcaattggtgcgccgtatcgatcgcaaggggacgcattgattcactctctcgcccggtgaacgcttgcattaccaagccacgtagatgtgtatgtgcaggcggattgatcgttataaacatccggctaaatgcttgaaacaatggcatatcagcagcgctgtctccgtaccgtactcgcatgctctccatgtatttttttcccatgttccggttgtggagcagggagtcgactaggctgtagcgtcccgtcatcagtgcattcggtccgatgctcacgaagggtgcctgtgcgcgtagggtttcatacagtggatagggattttctaagaacgcaggattggagaggtcggtgagtttcacgtgatcgtgtgtggagggagcgtggattatgagtttctaagggatgcaagcgtgttgcgcaagcactgaagtatgagatttggaatgggaggcacaagttttaaagtgaaattttattgcgtcattgggttgtctctctatccaaatggttgctatttgctaactatcttggaggcgttgtttgtccaatcatgacagcatttttaatgtgattcttagaatgttcattcgtgtttacgaaggcgtgtggacattgtgtttttaggttggaaggaagggggagtgttccaatattcgtcttactggttaactcgtcatggtaataagcatctgaggatcacagcggtttactgtgtgaaaatagaacgctctttacgtttaggcaacgtggcaacgtcagttctatgaatctgcaagtgctgaccgtcatgcgttatcccgctgtgtacgattgttactgatgtgatttgactcaagcgcttcggtcattggcatagggtctacacacgcatgaaccaagtaggtgaagcgggtactggtttgcgccttatttgtgcttcattctcgtcgtgacggtgttttgtattcctattagagtttaagcatatgatcgaaagatgtgtcagtgccgtcatgatgtcgcgcgcatcttttgcaggtttaagggctatcgctatatctgcttcgggtactagaagttcggtgtcgtgtttatcgcttttatttgttttgttctgattacggaaggttagtgattctgtgagcaggattgggatctgggtttgttagtgaggcgagggtgtgttggtacatcaacaaaaattggtgtgatggagtggttggttacgttgacggtgaatgggtgtggttggatggtttgttcagatgttgaattgggattgatatgctttaagtgcagtgactgggttttttgcagagtagattccgctgattactgcgagtagctctgcgccggcttcgatgataggagcaatattctttggcgtcagtccgccgatggccacgcgtggtacacccaaatgggtggtttggcgtagcagttctggtgtggcgcggtatggggtggttttggtatgactcggatagaacgtaccgaagcctacgtagctggcaccggctttgattgcttgtttcgcacgttcaatttggttgtagcaggagacgcctatgatggcgtgcggtcctaattgtgctcgcgcaatgctggggttgctgtcatgcatgcccaggtggacaccatctgcgccaatggtttgtgctaattccaagtcgtcgttgatgagtagggggatgccggtttgacggcatagggctagtagtgcctgtgcttgttctgtgcgtaatgcggtgttggctagtttgttgcggtattgcagccaaacgatgccattcagtaatggtgcggtgcgcgcgataagtcgtgcagtgtcagtttcatcaggagtaattaggtagatgccgcgaggctgggacatgaggggtttccgaagtagaggatgcggtgtgacaatgccagtggtcttatcaatatgttcttggaatgatcctatgcgtgaaacttccacaatgatgtggcgtacctggaggtgtaccgtgtgcggctttttgtaccgtgaggaggaggggtttccggaggagggaatcgctgcagggacgcgatgggaggatgtgtctgaggagtgggtttgccctgattgcggtattggtaaggctgatttcgagatggtgatcgttgggtgaggggttatctcatcattttttgaatcaacgatgtttgttcagtggttaataggaaatccttgagctcagtgacgcggaatccggttgtgtgtttggttcttctggcatagtttttatagtgtctttggctgctttaaatgtatgtaaatattttatatctcgggttcatgtctcttttttgatgtgacaatttaatctctttttgtgattttttgttttttggatgtactgagggtttttgtgtcattagtttgctctgtttaaaatcaatgaatacattgtgtttcagcttcaatagcatgttggcgtgtgggctgtttcatcagttttgtgtatttggggtaggttgtgtatctctgttcgatcgggtgttctcaaatgaacacatacttggtcatcggtcgtgtccttgaaagtgacttgttaaaccgcatctgttggatgtcgccggcagatgtccggtctctttcctaactggggctttttatgcggatggataagcttacttcgcgtttccagaatgcgttggctgatgcgcaatcgctggccgtcggtcgtgaccatactattattgagccggtgcatgttttttcggcattgcttgatcagcagggggggagtacacgtccgttgctcatgcaggccggtgtcaatgtgccattgctgcgtgagcggttgaccgagatacttgaggcattgccgaaagtgagtggtcagacggttaatgtctcacccagcaatgaattgagtcgtttgtttcatcggactgataagttagcgcagcagcatggcgatcagtttatggccagtgagtggttcgtgttggctgtggtcgatgatagtggggggctgggccaggcgttgcgtgctgctggtgcggaaaaaaagaagattgaggctgcgattgataaattgcgtggcggtgaaactgtccagactgagaatgcggaggagcagcgtcaagcgttggaaaagtacacgattgatctgactgccagggctgagagtggcaagcttgatccggtgattggtcgcgatgaggaaattcgccgcacgatacaggtattgcagcggcgtacaaaaaataatcctgtgctgattggtgagccgggtgtgggtaaaactgccattgtagaagggctggctcagcgcattgtcaatggtgaggttccggaagggttgcgcagtaagcgtctgctctcgctggatttgggagcgttgattgctggggccaagtttcgtggtgagtttgaggagcgcttgaagggggtgcttaacgatctcgctaagaatgaggggcgggtcattttgttcattgacgagctgcataccatggttggtgccggtaaagccgatggtgcgatggatgctggcaatatgctcaagccggcgttagcacgtggtgagttgcattgtatcggtgcgactacgttggatgagtatcgcaagtacattgagaaggatgcggcgttggaacgccgtttccagaaggtgtttgttggggagccgacggtggaggataccatcgcaattcttcgtggacttaaggaaaagtatgcgttgcaccacggtgtggaaatcactgatccggctattgttgctgcggctacgctgtctaatcgctacatcactgatcgtcagttaccagataaagcgattgacttgatggatgaggctgccagtcgtattcgtatggaaattgactccaagccggaagagcttgatcgtttggagcgtcggttgattcagttgaaaattcagcgtgagatgctgaagaaagaaaaggatgaggcgagcaagcagcgtttagccgatcttgagcgtgatattgaggttctggaccgtgaattttccgatctggaggaggtgtggagatcagaaaaagccgcgctacagggggcgactaagatcaaggagtcgatcgagcaggccaagcttgatttggaagccgcgcagcgccgtcaggactacgccaagatgagcgagattcagtatggtgtactccccgcgttggagaagcagctggtggcagcaagtcaggcggaacagcacgattttacgttggtgcaggagaaagtgactgctgaggagattgccgaggtagtcagtcgttggactggtattccagtgagcaagatgcttgagggcgagcgcgataagttgttgcgtatggaagctgatctaggccgacgtgtggttggtcaagaggaggcgatcaaggtggtatcggatgcggtacgccgttcgcgtactggtttgtctgatccaaatcgaccgagcggctcgttcctttttctgggtccgacgggtgttggtaagactgagttatgtaaggcgctggctgaatttttgttcgacagtcaagatgcaatggtccgcattgatatgagtgagttcatggaaaagcattctgtggcgcgcctgattggtgcgcctccgggctatgtgggttatgaggaaggaggttatcttactgaattggtgcgacgtcggccttactctctgattcttttggatgaagtggagaaggcgcatagtgatgtgttcaatattctgctgcaagtacttgatgatggacgcttgactgatggtcagggccgtactgttgattttcgcaataccgttattgtgatgacatcgaacttgggttcacatcagatccaagaactcagtggagacgattctccggaggtgtatacgcaaatgaaggcggcagtgatggaggtggtgcaggcgcattttcgcccagagttcattaacaggttggatgatattgttgttttccacccgttggacaaggcgcaaatcaagcagattgcgcggattcaactgcaggggcttgagaagcgtctcgctgaatctgagttgaaactagatttggatgatcgtgcgttggaattgcttggtaatgtcggatttgatcctgtatatggtgcccgcccgctgaagagagcgatccaatctcagctggagaatcccttagcgcagcagatcttagctgaagcgttcgtcagtggagatactgtgcaggtgggtgttgatggagggaagcttgtattcgctaaggtgtgaagttgtttactgtatatagtcagtagtgctgtgtattgtatgggtgtacgaggggtgtggttataaataacctttcttggttgccagtagtgttggtttatattgatcaggttgggtccgcgcgcatcgtgcgcggacagatgtaaggtctgtatggaaagccaaattaatttggctggatgctaagaaatggacgaaggaggagatcaattgcgacagtcattgagtccatttggtgtgtggatttgatctgagtagaatgacatccataaggcgcttatctgttgtctgaggaatggatctggctatagccagatccacagcccctttttctgtctagagtctttctaatgccgtagcctgaaagagatcaggatttttgtggttttatcaatcctggttggtaggatcctatgatgctctttggtcagaattaccgacaaaaaaagagcctatggtgatgcatcctaaaatagtcctaactggatagggtcatggttttgtaagcagtggtttttactgcgctcgaatccataacaggtcagatggctttggcaaccgttttcttcacaacagtcctaggggattgtgctttgggcgcgcgcctgttggaaaggggagcagccgcgtctaccggcgccttgcttatactatgcggacgcgcattcccatagctggcgttatagcgcttgcccttggtggttttgcggtcacctttacccatattattaactcctgatagagctgaaagttgctaaacaccgcgttaatacggagtcttgctaagggcggcaactatatcatgatgctctttgctcgggtatctgtccgagcagggcaaccgtgttttagtgttttgaggaagtgttatcaatatggctatgattaaggtgtaggttgaccaagtgtgcgataccaatcaaggtcccgcctatagccatcgtcactgcatgcagggtcggggcatggtgtagtggatcgtatagtaggcccaaccataatagcgttagtccaggcaataaaatgctgatggcgcgccaagtgcggtgcttgaagtaactgagtattaggctgaacagagcaagtaaggtcaccgataccacgatcacctgttcaaccccatctccaaaccatagcaagaacccagaggccggggcgatgacaagtaacagtggtagcaccgcgcagtgtaatgcgcatagcagtgaaccggttgcaccgaagtgatcgagtcgatgacggaatgtgtgtcctagcatggctttaatgttcttaaataaccataagagttttgaatgatataatattaccttactattactgggcaagtattacatctctaaaaccatagatccatctttccatcaatcatagaacgccattactggtagctcactaactgtacggatttaatatgcttgtcacccatatcagtattttgccccgcactgttctttttctggctgtttccagtttactcctcactccagcgttggctatggctgacgttggaccgccgcccacagattcacgtcatttcaaaacgacagaagtcacgcgccacctcaaggacctggacgcagtggttgttactgctattccattacgtgatagttatagtgatttgagtcgtccggttgcactgttggcgggtgagaggttggatgaagtacgtgctagtagtcttggtgagactgttgccgtcttgcctggtgtgcagagctcaaattttggccctggtgtgggccgccctatcatccgcgggctggatggtccgcgcattgccgttctcaataatggtttgtcctctcaggacgtgtctacggttagccaggatcattcgccagcggtcgagccatttttggctaatcagattgaggtgttgaaaggcccgtccactttactatatggttcaggcgcgatcggtggagtagtcaatatcgttgatggacgtattgctgaagcgcccgtgggtggtttcaacggacgtgctgaaatgcgtttagacggtggtgataaacatggtaataccaacatgttccgcattgatgctggtaacgggagtgctctatcggtccatgcagatggcgtctaccgtaacgaaaaggactatgacaccccgaaggggcggcaggttaactcgttcatcgacaccaaatcaggctcgatgggtgcttcgttcagcggtgattttggtttctttggcctgtcggtcgcgcgttttcatgacagctatggcaatccgggtgagcctggtgatcctgtcgccggtgaccgcggtagttggttgcgattgcatcaggatcgttatgacttgaaggctggtttaactgatccatggggtgaggcgagtgccctgcgtttcagcctaggtcatactcaatatgatcacattgagtttgagggaaacgaggtcggcactactttcggtaagcgtgcttcagaggggcgagtcgaggcctcctttgcatttggtggtggctggcggactgcatttggtgtacaggggggcgactctactttccaggcgcttggcgaggagtcatttgtaccaaagacgaataacaaatcaattggtgtgttcggattggcgcataacacttttgggttgtttcaagcagaatttggtgcgcgtggtgatcaagttaaatacgatacggataatggcgttactcggaattatcacccaggaagtttggcatttagtggtgatttagcactctctaagcaatggcggctgactttgaacgtggatcatgccgagcgtgctccggtggaggaggaactgtttgccaagggtccgcacattgcgactcttgcttatgaagtgggtcgtgccgacctgaagaaggagaaggctaaccaagctgagttggggttggtattccgtaacgattggagtgatgccaaagtttcgacctattacagtcgctatggcaatttcatttacttagtcgatacagggagtacttggttttgggatgatggacagcgtgatttgccggtccgtcagtggtcgcaagctaatgcaatctttcacggaattgaaggtgaggccacctttcatttggctaaaaataccagtggatcttgggacctacgtgtattcggtgacacggtgagtggtcgcttgaaaaatggaggcaatctgccacgcatcgtcccagcacgttatggggccgagctacgctgggaggatgctggttggcgcacatcgttgagcgctaagcgctacgaaaagcagaataaagtagcggttaacgagaccccaaccgcaggatataccatggtagatgcgcatttggcctaccatattgatgtggatagcattgcctgggaggtctttttcgatggtaacaatctcaccaaccgcgatgctcgtgttcatacttcattccttaaagacgatgtcatgttggctggccgtaactatactgctggtttgcgtatgttcttttagcggttaggtgctcccataatcgcttaacggcttttattcttagcagtattaggtgcctgagtctttagtgtttatttcatagcggcgttctgcaaagggcgccgctttttattgcttttgttgattgaaattgcagagtgtgttctacataccttattttctacattattttagagttcatttagacttcttcttcctgacttcataaatagcatgaggtaattattcttctgatgatttattgtggctaattaaatattttagaagtagatgcagtaatagcatgggtttccaatatgacaggtaataatggaataaaatgctgataaaaatctcctttgttttaggtgttgtttttaacgatctcaaagaaattagtattgttgagtaactcttaaaataagatttcaattattaaaattggtgtgtgccactctttcctggaggtgagtagactttcgccgatgtatcattcgttaatgagagcgtacgctcaggcgctgcaacttttgcgctgtttggaaatgaggtttttatattatttaagtaagtaggtaatcgcatataaatgagttttgtctattctggcttcgtcgaaatgacggccaagcatcatcttgagcagcttccagaattcaaaactggtgtagcgttttggtggcaggtcagagcgacgtttgggcgttttgttggtattgtgctgccggtggcgatggtgtgatttaaacctgttccaatcaagtgtgatgttccttggtgccgcaagtcgtttaactaaagagcttgaataccaatgaaatacaccgcttggttgaaagccgcaccaatagactttggagtcgaaggggaacacacgtagatatcgctttcttgctattctgttgcacgccgttatctgcggctgcatgttgattagcgcttacgcttgattgttgccgatgtggcgggtcgggtgcttttcgtcacgtagcagggagacgctcttgtcgctgcccaggtcgattttcagcaggcgaaggctattaattccatctttgcggcgtgcagtgagcagcgggaatctgaaacgatcacccccataggcatggggttgcggcgttattgcatgtaggttagcagagtcatctctttctgtgccgtcagactgtggtcgctatgtttcggtttggcaatgatacggatccgatgttgtcggagagtggctttacaaggtgtcagcagcgatatcggtacgctgagcacggttaatgcgttcttgagcacctgaagtcgtcagatcagtcgatggtttcgttgtattttgcccaggagtagtttggtgccggtactcaaaattgctctatggaaattttcctgggttaaccgatcaatgtgcctggctatgtacggccagtctacagcgcagcgagatctgccttattgatagtacgcccccattgatcctctgggttgggggcatgccttccagcatctccacgactaaccgtcacccttgggttgcgtctgtgctgtccttggtagtgccgcttcacctttggtgattcgttccttggctaaacagcattttgttgattgcatcgttgcgatccgtcagagtgcgcagtgcgccgcagacacggctagcgtattgaaggtttcagcttctgaatggacggttttaccttagaaatacagaaaaacccccaaaaaaccgtagggatataagaggctaaaaacgctgtgattccagtgattaatcaagaaaaacaaggtatatcaggcgattttaggttatctgtcgccccgatgatgaattggactgaccgctattgtcgcgtcttccatcgagtgttggcgccgtcggctcgtttgtatacagagatggtgcatgccaaagcagtgatttatggtgatcgcgagcggctattgggttttgcgtcggttgagcagccggttgcgttgcaattgggggggagtgagccagcattgctggcaaaagcagcgcgcattgccgtagattgggggtacagcgagatcaatctcaactgtggttgtccttctgatcgcgttcaggctgggtcctttggtgcccgtctgatgcgtgagcctgcgttagtagccgattgtgtggcagcgatggcagccgtagtttcagttccagtaacagtgaaatgtcgactgggggtgaatgaagatgatgattacggacgttttgctaagttcgttgactgggtgagcagggcgtcgagtagcaggatgattgtggtacatgcacgtaatgcttggttacagggactttcgcctaaggaaaaccgtgaaataccaccgttacgttacgattgggtttaccgtttgaagcgtgagcgtcctgaattggcagtggtactgaatggcggtatcacttcggttgaggctggattggatcatctgcttatggtcgatggtgtgatgcttggtcgagccgcttatcaagatccttatattctgcaccaatttgattgtgctttatctaatgcgccgttgctaccgcgcgcgttgctgctgcgtgcgttgcgaccctatgtcgaggtatggttggagcaagggttgacgctcaggcacattgttcgccatctgtttggcctatttcatggccagcctggcggtcgtgtattccgccaagttcttacccaaggtgggcaacgatcggatgccgactggtcattggtggaacaggcactatcaataattgaggatcaagaaacatatgctgcggtagtttgattagagcttctcctccaataatatatacagtttttggcgatatgaattgtctttaggtcctaaaattgtaatatttcataattatgaacgtgcttagatcgatcttggaaagttcagatatgattcactattgaaaataaataatcttctttaagctttagtgtatttttgtcttttttctgaatgatccagaagcatttgttaggatcccagtgctatgaaggtttttttccgctattgctgccttgccgtagtcatttttatggcttgcttggttgcatacccggtctgggcacaggatccgagtagtcatgcggatggccatgggctgcttccccgcaatggtagtaaaaacaacactctgtcagatgcgatccgacaggtgcagagaaccactggtggacagattcttggtgcagagcaggtgcagttcgaggggcgtgatattaaacgaattaaatatatcgataatacgggtcgggtaggtgtatgttacacgggtgagtctttaccagcgtgcgagttcccgcgctcttcacgcatggacgttgaggtaaacggattaccgccacgtgccgataacctttagatacgatagattttgtggcttgcattatattttttagtgtatttacattcccacggcctcccaggccactaacgaaactagggagagttcatgcgtatccttttggtcgaagatgaggccccattgcgtgagacgctggctgcgcgtttgaagcgtgaaggtttcgcggttgatgccgcccaggatggtgaagaaggcatttacatggggcgtgaggtgccgttcgatgttggtattattgacttgggcttacctaagatgtctggtatggatcttgtcaaagctttacgtgacgaaggtaagaagtttccagtcttaatattgacggcgcgctctagttggcagagcaaggttgagggactgaagcaaggagctgatgactacttggttaagcctttccatgtggaggagttgttagcgcgcgtcaatgctttgctgcgtagggctgctggttggagtaagccaactcttgaatgcggttctgtagcgcttgaccttgctgcgcagacggtgagcgttaatggcaccaatgtcgatcttaccagttacgagtacaaggtgcttgaatacttgatggtgcatgctggtgaattggtttctaaggctgatttgaccgagcatatttatcagcaggatttcgatcgtgattcaaatgtgcttgaggtgtttatcggtcgcttgcgtaagaagctggatgcagatggtgacctgaagccgattgagacagtgcgtggtcgcgggtatcgtttcgcaattgcccgcaacgaaaattaagatctgctgtgcaccatgctaatggggaaacggcgcctcttgtcgcgtctgtggtggtccaatgggttccagccacgttcgcttcaggcgcgccaattgtttgctgcaagcttcagtttagttgctttcctggcgttggctggttatgcgcttgacgcggctttcgcagataccgctgaaaagaatttacgtgaacggttgaaagcctacgctacagcatatgtcagcagcgttgagttcttgcgcgatggatcattatatattagtagtgatcgtccgccacctgacccacactttgatgtgcccggcggtggattgtattccgaagtgatctggcctgccaatcgttggcgttcgttgtcatccgaggggccacttcttcctccggtaggtccattgcttaaggctcgtcaggaggtctttgaagggccgttcgaaatgacccaggttgatggcaagcttgggcgagtgtatcgctacggtatgggattgatctggaacggtactggtaatcccaacgacgagttcccttatacgatttacgtgatggaggatgaggctgcactaggggcacagctgcgtgtatttcgcacggctgtctggttctatcttggtagtgctggcatcgtactattactgctacaagcctttattttgcagtggagtttgcgtccaataaggcacgtcattaacgagttggctaaagttcaacgtggtcaagcgcagaggatgagcgagcagcatccccctgagctggaaccactcacccagagtattaacgcgtttattgagagcgagcgtgagaatcttgatcgtcaacgtaacactttggctgatctagcgcatagtttgaaaacgccacttgcggtattacgcacccagttggatagcggtgctagtgagaatgagttgcgcgaggaattggacgtacagttacgacgcatgaataatttggtttcttaccagcttgcgcgtgctgcttccagtggccacaaacttttttctgcgccggtattgatcaattttacagccgaagagatcgtacgtggcctggagaaggtttacgctgctaagggcgtgttgtgcgaatttgagattgaccctaaggcttgtttttatggtgagcctggggatttgcaggaactgctaggaaatctgttggagaatgctttcaagtgggccctatcacgtgtgttgttaactgctagcccaggtgagcaggttggtaccagacgtcctgggttggtgttgtcggttgaggatgacggtcctggcattccgcttgaagaggttagcaaaatcttacagcgtggtgtgcgtggcgatgaacgtgtacacggtcatggtatcggattgtcaatcgttcaggacttagtcaagggttatcgtggcgaattacaggtgactcgttcggacgaactgggcggggcttgctttgaggtggtattgcctccagggttataacagtttttgtaacatgcttttctgtaacgctttcttatattgcttgttaaatgaagatttttaatgtggcaattatcaattaatttatatgcgtagaattgtaataatagaattttccagattaatacctggtttgtgttaaccctgtgtttcgctttgatgaaggtgatatgtaaatttctttccgaagaaatcacactttgtttattcaaaattcattagctgatcattagccattgctttgatgtgtagcatgattcgatcattatttttaattttatcatatgctgaagaatttagatattagaatagagggatataatatttttagtatatattgactgatttaattgaaaattcgatgaggggtgaaagattttaaaatagtaggcgtgtctcagagaagaaaatatagagtgaattgaagtttcttgagaattaatagttggatgtgttatgatttttcaatgtttcgagcattatatacttaaacagtggtggtgcatctttattttttgggttgatatctggctttttcgcaagtgttttcgatgtaattagataattgcactgaaaaagtatttaattaatttcattcgctattgtatgtaatatatgtctcatttggttgtgtgctgattctgattttcatgaggcgatcatgtataatttgtacattctgatatgcacttgagtagatggtattcataaaacctcaatatttctaaactgaggggaatattaatcccgttaagttgtaataatcgtgataaaaatatatagggtatggatattagtattgagttattttaatgggtttatattgaatttttaataagtattaaatggtgtcagtatttagatggatctactttgggttgggtcttttatttgcatttgagtgattaaattattttttgctgtgctgtgctgtgctgtgctgtgctgtgctgtgctgtgctgtgctgtgctgtgctgtgctgtgctgtgctgtgctgtgctgtgctgtgctgtgctgtgctgtgtgtattttttcgatcttatcctgatttatttagcagttatgtcacagcaactatcatcagaggtagcagggttgagagtcaatgattcgattgttatacgacttcttttttcccaatttgtgtacgtcaaaatggcggctttaaaaacaaattagatcggtgattttcaacagtgttaatggaaggttgcactgacggagcatcgtttcagtcttttaattttctatcatctttaaagatgatctcagtacagtatactcaccctttattttggttttcgtatgacattaatgggggaattaaggaaataactccgcttgcggtatcaggttcgttcagtgtctttttctcattgcttggcttagatcgtagagtcaaagatgcttgattgaaatgaacaatacagattggttgcattgagcgtatcatagatgcttacttatcttttcattcgaattaagggatatagacctgatgtccagctacctttttacatccgaatcggtttcggaaggccatccggataaggttgccgaccaaatttctgacgcagtgctcgatgcgatcttggttcaggatccgcgtgcccgtgttgcttgcgagacaatggttaagacgggtgtagcgatcatcgctggtgaaattactaccagtgcctgggttgatctggaagcgttaacccgtaaagtgattgttgacatcggctataacagttccgacgttggtttcgatggtgctacttgcggcgtgttgaacttaattggtaagcagtccccagatattaatcagggagtggaccgtaaaaaggctgaggaacagggggcaggtgatcagggcttgatgttcggatatgccaccaacgaaactgatagctatatgccagcggcaattcacatatcacaccggctagttgagcagcaagcaaaaattcgtaaaaaaagcaactcgccattgccgtggttacgtccggatgctaaggctcagattactttgcgttatgaggacggtgtggccagtgcgattgatgcagttgtactatcaacccagcacgatcctggtatcaaacagaaggatcttgttgaagcagtgcgtgaggaaattctcaagcctgtgttgccttccaagtggttgcacaaaggaaccaaattccacattaatccaacgggtaaatttgtgattggtggtccggtgggcgactgtggtctgactggccgcaagatcattgttgacacgtatggcggttcagcccgtcatggcggcggtgctttctctggcaaagatccatcaaaagtagatcgttcggcttcttatgctgtccgttatgttgctaaaaacgtggtcgctgctggtttagctgatcgttgcgaagtgcaggtgtcctatgcaattggtgtggctgagcctatttctatctcagtgactacttttggtacaggtaagatatccgacgataaaatcgagaaactaatccgccagcattttgatctgcgtccctatggcattataaaaatgctagatttgattcatccgatatatcaaccgagtgctagttacggtcattttggccgtaagccgagagagttggcttacaccaacagcaacggtgaacgtgtggttgcgactgctttctcgtgggagaaaatcgataaggcagaagtactccgtgccgatgctaaactgaagtaggtctgtttttccatcaatagcgagtgatgagccaatttgctatgagtcacttcagccgacataatccgtttataagtttggctgccccggatggattcgaaccaacgaatgtctgagtcagagtcagatgccttaccacttggctacggggcaatagggtgggggattatcctggaattacgattttctgccaacctttggtggctatgggtggactcgaaccaccgaccccagcattatgagtgctgtgctctaacctgctgagctacatagcctaaacagcagataattatcaattttttgattctagttcgtcaagctacgtgtgccgctacttggcagaagcctagagtcatggcagagtcgcccaccgtaagtttttttcaggagtccgcatcgtgatcgatccggacggttaccgacctaacgttggtatcgtgttgatgtgtagggatgggcaggtgttctggggacgtcgcgttcgtcttgatggttggcagttcccacaaggcggcatgcattctgacgaaactccagttgaagctatgtaccgtgagttgaatgaagagactgggttgttgccagagcacgtgcaattacttggtgctacgccaggctggctgcgttatcgattgccgagtcaagccgtacgctgcaatcgatcccagatgtgtatcggccaaaagcaggtctggttcctgctgcaactgataggtgatgaatcgcatgtacaactcgaccagagtgagaatcccgagtttgatcattggcgttgggtgagtttttggtacccaattgagcatgtcgtcatgtttaagcgcggtgtttatgcgcgtgcgttgtgccagttagcatcactggcacagcaggtggtcggtcttgaggtagggacgatgccgcagtacgtacaggatatttgtttgcttaatgttggatacaagcatttacctaattgggtgagtcggtattgatgtaagcggataggatattagtaacgattaatttttgtaattgacattcattctcatcttgtggttgaatggttatgtcccacttagggatgccactaccttatgccgcgcgtgtacatttgcatctgtaacgctgtcactgatgatcatatttatgaggttgctgccagttgtgccgatcttgccgagctgaccatgcgtactggctgtggttccaattgcggctcttgcttgaatgcggctgctgagcttctcgttaaagcgcgtgccgcgtgtgttatgccgcaatcagcgttgcttgatttgggaacgatgtgcaacaggtaatcgtaatgagcacgattttcgttccttcaccggtagatcaaggcagttacagtacctggaattttctaccggagatgtcgtatgaagggagaccctaaggtcatcgaatatcttaataaggtgctctacaaagagcttactgccatcaatcaatacttcttgcatgcgaagatgctgaagaactgggggctggcggagcttgctgagcacgagtacaaagaatcgattgatgaaatgaaacacgctgatcggctatctgaccggatactctttctggatggtttgccgaattttcaggcgttgggtaagttgcgtatcggcgaaagcccaaccgagatattcagtggcgatttggcattggagcaggaggcagttgcattactgcgtgaggcgatttcttacactgaatcggtacaggattatgtcagccgggagctgttggtcgatattctcaactctgaagaagagcatattgattggcttcaaatgcaattagatattatcaagcgaattggggagcccaattacctgcttacaaagttgtaaaacttgattattcagtgctagatcggtgtgcaatcttcaggccccaagctgatttcacgcgctcatactctgtgaataaaagtgccaccatcgtatcggccagcttagtgtctccgctatgtgcggccgattcgatgcgtcgcgctgcatctgagagtgcgagtgcgccgacattagcactagaggattttagtgtgtctgctgcttggctcagtaggttggcttgttgccgcgcgacgctctcctgtagctgggtgaccagtttagctgcatctcctttaaaaatagatcaatgatgtgatccagctctttgccaccagcgatttttctcagttcttcgagtagttcatgattgagcaccattaggtgaggtgaggtgaggtgaggtgaggtgaggtgaggtgaggtgaggtgaggtgaggtgaggtgaggtgaggtgaggtgaggtgaggtgaggtgaggtgaggtgaggtgagtggtggtatggcccttgtccggtgctgtaacgtttgcgctattgttagtttagtttcatgagaaacaagctttattgtggaggtggaaagagtttcagtgtgtcttacggtgaccgtagcggaagagggagaacgccagcggtgtaggcaggcttctatttccttgcgtgagataggttttgacagatagtcgtccatttttgcttccggacagcgttcgcgatcatctgtgatggcgagcagtcagcgccacgattggtagaagtggattctctgggttctcttggattacgccagtagcgggttgttgtgcggtccatgaatactaaatcgtaatgaatacgttgcctactttgcagggcagctgtaccgtgcacagcagtatctggttggtagccaagtatgatcaagattttctgtaccactgttaagtcgactggattatcttcgaccaagaagatgcgcgcttcacaacgtggaaatggtgccgatatattgtcattagcgatagttgtctcaggtttggcttggacgtggtcgtcttgattaagcgctgccagcagggacatctggtgctagacgtgacacttgttggctgtgtaaaagcaattcttcactcatggtttattcgccatgcagctagaccatccatggcggctccccttttgggggggagttgtactgcatgatgtagcgcgcgtgcgttgtagcgaacactgaggtaatcaacgacgatcacatcgaagcgtaacagagtgtttgtttgacgtagctgttccatggcttcttcagtaaaaaccacatccgtgttgtgtgcttccagaagttgtgacacgcgttgccttaggggtgagtcacagcagaccagcagtgcacgttggccgatattggtatcaaggtttaactcacgagctgccttcagtagtgggatttcgaaccataacgtggagccgacgccacgttgcaattctattccgattcgcccactcattttgccaagccaagccaagccaagccaagccaagccaagccaagccaagccaagccaagccaagcgctgtgctcccgtataggcgtgtggttgaagtgtcagcttggctgaacgaagagaacagtcgtatttgctgttcggaagaaatacagataccggtatcgtgcacttcgaaacgccgtatgtgatgcgtgccgttctcgccaattagacgtaactttacgttgatacggccacgttcggtgaatttgatggcgttgccgaccaggttgctaagtacttggtgcaactttacttgatcaccgcgcactaacaggtggactgtggggtcgatggataatttcgaatgcgagacgtttggtttcggagagatgccgcattagccgtgtcacaccttcgagtaactcacgcaagttgaatgtggtgatttccaatttgagtttgtttgcttcacacttggaacagtccaagttgttgttgacgatacgcaacatttacagtgtgctctcagtcacgatttgtaataaattgcgttgttcgtgttcgatgttgttctcagcgatgacttcaagtattgggatgatgctatttgggtggggtgcggatctggtggttcatcgctgccaagaactcgcccttggctaatacagatgtttctgtaatgtgtttgaccttcactaactcttgtttgagtttgctatgttgctccagttcctgttgcctgcgatcacactcagcctccgcatgttttgcgcatgctgaccaagtcatcacagctaggtgtagatgcctaacctggcgtgtggagagtaatatcgtgccaattaggagcacatacgtagtggcgatgatgccgaaaacaagccgaggtagtgcagcgtaggcatcagctaaacaatagataacgacggttgttacgattgcagtgcctgtgattttggttagccagctccaagttcggctctgaagcctctgagtcattccctcagagcaccatgtcgtgaaagttgaagttaagatctttgctgacgttctggaacagattaccttgtatcaagtcgactccgttcatccacataaacgtagcggcttgcgcgtcttcgatacattgtccaataacatgcaagttgtgttcatgcgcctgttcaatgagcagtgggagttctttttgccgttctgggtggttgtgtgcgtccccaaaatgctgagatagacgtacgaaattgagtggtaattcgctaaacaaaacagtggcttctgagttcgattcgaattggcttagacagaactgtacgttgtgttccagtagttgtttgcagagctgtttgagggggatggtgtgaataactgcgtcttgcaaacgcaaatcgatcaccagtcccgtaccgttgacattacgctcctgtagatttttgatgatccaatcagaaaaaccttcatgtattagtgtgcgtaccgattgcgatacaaaaagccgcagttgctgattggtgtcctggtgtagtttcagtatgtccaatgcttgttctatgacttgctgatccagttccatgatgcggccttctgcctccgcagcagggatgaccagaccagctgacagcaagttgccgtctgccttgcgcagacgcagtagtacttggtattgcgcagtatcgcttccagctacttcgacaatgggttggtaggccaattctaactgaccatcaagtaacgctaagtgcccggtattctccggtgtttgcgatggtacgtaggcgtatatgccttcgttgttttggcgtgcttctagggtggcacgctcagtacactccactgcatcgtcggcgtctttaaagccttgattcagcggggcatagccgattgcactgcgtagatgtactaattcatcgtcctgtattggcagtggtagcgtggccagatgctcacgtaggtgtgaggcaagagcttgatgttcatttgctgccaagtctatagcaaggagcagaaagctatgatcgctgatgcgtgcgagtgaatatggatgtgcttcttgcgccaaatggtattcaacttggttcatcagtcgctcgaaagcagtgtaaccatagcgcgtgcgtaggttcagtgcgctgctcacttcgataaagaacaaagcaccttgcgcgccactgctaagagccacttctagctgttccactatatgtgtacgagtttgaagctcggtgacggaggccttctggatgtttatctgggtatcggcctgttgtgcgttttgctgctgctggcgcagcctgtgcatcctattagaaactgcggcaatgaggtggcgcggttggattggcttagttaagaaatcatcggcaccactatcaagtacctcaaactgcttttccggatcggtgtcgctgctcagaaacacgattggtaatagcagttgatttggttgctggcgtatcaatgcggttagactgatcccatccagctccggcatgttcaaatccatcaaaatcaagtctgggcggtaatctttgatcacttttagcacctcggatgcagacatctcgatctgagcatgtatgccagcaccttgaagcacactttgtgcgaacaacgcctgtgaacggtcgtcttcaacgatcaagatgcggtactgagtatcgtcggtggtcacgttgtcatacgcctttgaagtggtggtaagtcgcactgtttttgttgaatgtgttccaacttggattgccagtggcccagtagtgtgtatttggtcggcatagcatgggctgtaagacaaccttcagggtgatggagaccgtgtcttgttggttcatgacgacttactctggaattgaaataatgtggtttcttctctttagattacttgctgtgatgtattcagcttgccgcacacttttccagaacgtgtgtgctatccatttagagtagtaacatgatggatagggtggtcccggctattttttattgtcaaccaagtattggtcagatattggtcagagttttaatgataatcctgagtagcaatgcggctgcaacgccacaccattcatgctgaaacgaagtaacccccaattgactacttggtttaggtaagtgtttatggatgaaaacctaccagtctttatcttcaacgcatgtctcatcatccgtaatatataatatttaataaatggatattatgaataatatttgttacgtcaaaatcattaattaatgtattttttatttattttttaattcgtaagtccggaggtgtgcttatgcttcaaagtcatttcttaaagaataactcaaagaataatgaataacttgaatttacactagagactaaccgcaatgtcgcctagatatgatgcagagcagtaatctccaagtgatgttcaaattatagtgattgtatagtttccagtgtcggtcatcttttgatctaatgaacgatgaaggcatctgatgagccgcatgtggatttttgtcagcgatagcgtgccggtgaatggctcactacatattgtttaatctggaagatgcattaattgaagtgttatgccatcgcatcagcgtgtgttggcttaaactatgcctccagggtttcctgctttcctcagagatacactgcagatgcagcgaccaatctttcatcgtactttatccatcgtttcgtctcagcgcagcaacatgtctttgcgttggatcctgttggtggtgttttggttggtttcattagctttgacatgggggggggccagccattcagtcgtaccacatttggttgagaccgaggcacaactgcgccagtcacgccatatccaagcttctcagatgcatcagatccaaaaattgcagcaacgccagatcaatcttgagatatccgatcaaattagccgcgcagctaatgtcgatatccaatcattgcttgcagaacgtgacgaacagattgctgcgttacgtgctgacgtagcgttttacgagcggctagttggcgcgactgcgcagcgcaaagggttgaatacacattcgattgagtttgtgcgaaagcccagcggggtttgggattacaatgtagtactgacacagaatctcaatcgtggtgcaataagccagggccagttacgtttctctgtagatggtgtccgtgtaggcaagctgaccacgataaactggaacgatttgcaccagaaaaccgatgtcccgggacagccttattcattccgttatttccagcagttacaaggcagtgtgatgttgccgctggatttcatcccacagcgtgtaaaaatatcccttgttggtcaaggaatgtctgttacacaaactttcgattggaagcttgccgctaacagtattggagaatagtatgtttggaaataagtccaaccgtagtgatcgtaatgtcgtcgatactttgattggtccgcaagcagtgataactggtgatatcagcttcagcggtgttttatatgtggaagggaatatatttggcaaagtgattgccgatgaaggcgtatcagcaaccttagtcgttgccgaaaaggggcggattaatggcgaagtccgcgccccggtgattgtgatcaatggcaggcttgatggcgatgtttatgcggctgatcgagttgagctgggcggcggcgcgtgcgtccatggcaatgtgcattacaaagttgtggagatgcgtgttggtgcgcagttgactggaagcttgatacatactaataaccaagctgccttgccgcctccagatgaacccttgtcaacgctggaattggagacatctgttgcagcaggtccttgattcgcccttcctttgacctcatgcaggctatagtatgactatgctcatttctttgcccacggcaccatcagtccctaactatcagtcgctggagcgtccgttgaatttcactatggctgcagcagccaaagtccgtgaattgatacaggaagagaacaacgccgatttggcgttgcgtgtttacatccagggtggggggtgttctggtttccagtacggctttgagtttgacgaaaatcgcgctgatgatgatttagcgttggagacagatggtgttgtgttattggttgatccactcagtctgcagtatctgttaggtgcagaggtcgactacactgagagcctcactggtgctaagtttgtgattcgaaatcccaatgctaagactacctgtggttgtggcagtagtttcagtgtttgacgtgcttaagatttctcggtctcagtattagttcggttggcaaggggccttgcttatacggctcaaacccgcccattgacaaagtctgatatcagtgttttcccatctgctttggtgggtgcatcaagctaagtgcgatagtgatggctaggatggcgatgaccatcccaagtgagactagtactggaatcttgtacaggtcgatgatgaccatcttgatgccgataaagatcaggatcactgctagcccgtacggtaacaggtggaagcgatcggccatcccggccaataggaagaacatggcacgcaggcccagaactgcgaacacgttggaggtgagcacaatgaatggatctgtcgtgatcgcgaagatcgccggaatactgtcaactgcaaagatcacatcaatcactgcgattagtatcaggaccacgaaaaatggagtgaaccagcgtttaccgtcacggaccacgcttagcgcattgcctgcataatcaggactcaggcgcaggtgattgcgcatccagcgcagtatggggttagtttccagctccggttctttaccagcggaaaaccacattttcaccccggtcagcagcagaaatacgccgaacacgtacaacaaccagtggaatttggtcagtagtagtgagccagcgaaaatcatcaatccacgcagtatgagcgcgccgagtacaccgatgatcagcacacgttgacgttgttcatccggaacagcgaagtaggtcatcagcatcaaaaacacgaaaatattgtcgactgctaatgacttttcgactaagtagccggtgaggaactcaatgctgactcggttggcgatgcttggatcagcgatgctttgcaagtaccaccatagtccaacattgaacagcagtgcgaggagcacccaaccgatgctccaccaggcagcttccttaaacgtgactttatgtggtccgccgtggcgcatcaggatcagatcgaccaacagagctgctatcaccacgattgcgaatccgctccacaaccagagattgccaatggtttgcatgtgagtctccggggaaatgaagaagggcttggagctgcagggtggggcactgatatacggaaagctccttgtgatccggatatagatttttgcctgcgcggcgaaggtattgttcgcagttggccaaagtgccgttacagcgcgcccgctgttgatgggatgtgcccggcgacggtgactaacgtgtaggatctatccccctttataaaaccaatttagcgggccgagtgtaagcacgtcaaccgagccgaacaactacaatgcgccaatgtctagagatctccctgttatccgtcttaagaatgcttggcgttccagccacccgtggctgttccaaaagctcctggaaaaaccttccgtccgtctgaaaccaggcactattgtcgacgtcgtcggcgtcgatggagaatgggttggccgtggtttctacaatggccattcgcgtattgcggtgcgcattttggaaacccgccaagatgtggtggtggatgaagcgtggttcgtgcgtaggattgccgaagctgttggtttacgccgcgaggtgctgaagttggatgcagtgtctgatgcttggcgcgtggtacacagcgagggtgacggcctgtccggtttagtggtggaccgttacggtgacttactggtcgtgcaattcttcgctgcaggtatgttccgtcaccgagagtggatctacaccgcgttacgccagcagttcccaggcgctcgcttccacagcttcgctgacgaacatgttcagaagcaggagagcttcgactttcacagcacgattgatactgaatcggtggtgatcaccgagcatggcgtcaagtttcttgttgacccgatgggtgcacataagaccggcttctttgccgatcagcgcgagaaccgccagtggttgagccaaggtgttgcaggcaagaccgtcttggacctgtgctgcaataccggaggatttgcggtctatgctgctttacgtggtgcggcggatgtagtgggtgtggacattgaccaagacgtcattcagatcgccaaagccaatgccaagctcaacagcgtccgccccaaattcttgcaggccgacatctttccgtacctgcgtgatgccgcggtacgtggtgaccagtacgacgtggtgatcctcgaccctgccaaaatgacccgcgaccgtgatcagatcatcaacgccctgaagaaatatctagacatgaataagctggcgttgggcgtggtcaaaaagggaggcttgtttgccaccttttcttgcactggcttgattagcgaagagcagttcctagagatgctgcgtcgcgcggcattctattccggccgtaccatccaaattctcaaagtggctggcgctggtcctgatcatccgttcatggcgcatgtacaagaatcgcgttacctcaaagcaacgttttgccgcgtcctggattgaggggtgattgcaagacattgctttaaaaagcgtggttctacacaactattgagtgcttcagtcgctgcgtgtgcgacgcagcttgatcctgtaggcgattgctgcatacaaggttgaacagcgtccacgcgcactgatacggctgcccttgaagagcacgcctcaagctcctggcttaaatcggaagaagcatcagccaagccagtatcatttacagcccttgcaccgtcttgcttagggccatcacatccaccgtgaaagaattcaggtgagctgggcagtacgtccatgctcaccggtatctcatcagcgagtgtcacccgtcgtgtttgcatccacaacgtcgcgtacttattaatctgttgactgttgggttatcttggcgtgtcgatgcttaccgcctttgatagcaggctggtgtggcgcccatagaccagatacacacacaatcccagtgcgttccacagcagaaaaagggactgtgtcatctttggcagactccagaacagatacaaacaaccagcaattgcgattggcccgacgacccaagccagtggtgtacggaatgcacgcacgcgctgtggttcacgcacccgcagcaccagcaggcataaagccactgcgatgaacgcagtcagcgtgccagcattagccagcgcggcaatctcgcccaatggcaccaaccctgctgccgttgcgacgagaattgcagtgaacagtgtcgtggcgatcggtgttcctgtgcgtgcattcaccgtcgacaatccacgtggtagcagcccatcccgagacatcacgaacaaaatgcggctttgtccatataaaaaggccaacagtacagtgggtagcgcgataatcgcagctgctccgatgagcctggcggtgttgccctggtcaagttgccgcagaatcagcgccagcggttcagtactgggaccgaacacggtgtagtgcattgcaccgatcgcagccagtgccactaatacgtaaattaaggtgcagccgatcattgaaccgatgatgccgatggacagatcgcggcttggattcttagtttcctcggctgcggtggagattgcatcgaaaccatagaaagcaaaaaaaatgattgctgcagcggccatcaccccgcgttccacacctccggtgtcgattgacttggtaaacccatagggcatgaacggtttcagatgagccatatcaaaatgtggtagcgcgatcacgacgaacacagagagcgcaatgatcttaaccaccaccagaaccgcgttgagtgtggtgctttcttttgtgccgacgatcagcagtccagccacaacgcaggtgatcactaccgccggaagattgattatcccgccagcatacggtccggcggtgagcgccagcggcatatcgacccctacgctcttgagaaacccactcatgtacccggaccatcccaccgcaacagtgctgaccaccagtgagtactctaagatgagactccaccccacgatccaggcaatcccctcaccgagggccacatagctgtacgtataagtgctgcctgccactggcatcattgtcgccatctcggcatatgccagtgctgcgcaggcacagatgaccccagcgatgacgaatgagaggaggattgctggacccgctttttctgccccgactccgattaaggtgtagatcccagtgccaacgattgcaccaatgcccaatgcgatcagatgtggccagctcagtgtagggaccaggcgtcgtccttcttcatgcacggtgattagatcaatggacttgcgctttagaaacgatggcaagaatgacattacgggtctcgatgagtgaagaaaaccacacggatatgacacatatggcgtaataaagagtctcactaaaattgaaatttgtttcaattagatgtgattcatgttgagtgcatgggtggttacgatccaatctatatttgctgtgaaacttccaataccttgctacgcgttcatcacacagtggtatcaatgcatgacatggatcatgggcaaccttattgtttgagggtgcagcgtggatgcagtcaaagtcaacacgtggttggtttgtattggagagatgatggtcactcgcatgacatgaaatggttcaacaatgcttgctgcatttaaagagagcattgtaatgttcgtgactgtcctgttgacctgttttgcttgtttggcctattgtgctcagcgtttagaatcctctgaatacacaggcacccttctcgtctatttcggtgcagcgcatgacccgacggaccgtttgatttaacactgattccgtttgttatggattgatgtcccgcgagcggcgcaagcagcttttttgctttaatacgtttcctctgtgttgatcgcttgttgctggatcttcaaagaattacctgtcttgcggatgctgttttcgtcctcggagatcgcgcatattactcaagcctcaatatgctattgcgttttctttgaggttttatattggctgccgcgctttggtttgaatctgtctgcgtgctgttttttccgtccatggaaatcaggaggttctgcatggcgttcctttctcaaaaccgccctgtccatcctgccgtagcctcgttggtgcgagcgcaattacctaacgtctatgatttagtggcgttggcgttgatattgctcctagggattgccttgttgcatggtgccgaaggcgcacgcgcgccgttgagcgcgttgccggtggaagccgtgtcgttggatccaacacacctgcctgagtatgggttgcgtaccaccttgcgcatgtttgcggcgatgacggcctcactgctgtttaccttcgtggttgccacgttggctgccaagagtcagcgtgctgaacgactgattgttccagccttggatgtcttacagtcggtgccggtcctagggttcctgacatttactgtgacgttctttctcggactattcccgggtagccaactaggtgccgaatgtgcctcggtattcgcattatttaccagtcaggcatggaacatggcgttctcgttctaccagtcattacgtactgtgccacgcgatttgcaagaggtcagtcgtggctttggtttctccgcttggttgcgtttttggcgattggaggtcccgttcgcgatgcctggactcatctggaacatgatgatgtccatgtcagggggatggttcttcgtggtggcctccgaagcgattacggttggtgatactacagtgacgcttcctggtattggttcctacttggcgttggcgatcgcacatcagcagtttggtgcagttgcctgggcggtggctgcgatggcattcctcatcttgctttacgaccagctgctgttccgcccgattgtggtttgggccgataagttccgggttgagctgacggctggtcgtcagatacccagatcctgggtttacgatctgatttgccgtaccagactgctaaagcgcttagttgcaccgctcactcggctttggcagcgagtgcttctcctacgttggaccaagcgcaatagagtgacagtggtgcctgtgtcgccccgggcgggtagcgtgcgtggagatcgattatggcgggtggttttgtttgctgtggctgccgcttgcatctactttgtgttcaatagcctatggcagacactggacgtagaagatcttacagctgcattgggtggcgctttggcgacattactcagggtagtcgtattgattgccttggcctcgctgatttgggtaccgattggagtgtggattggattgcgtccggtgctcgcacagcgggtccagcccttggtacagtttttggctgcattcccggccaacgtactattcccatttgctgtggtcgcgattgtaaccacgggtgcgaatccgaatatttggctgtcgccactcatggtgctgggtacccagtggtacatcctgttcaacgtgattgctggagcgagcgcgtttccgactgacctgaaagaggcagcccaggtgtatcggttgcgttcgtggacctggtggcgccgggtgatgttgcctgggatcttcccctattatctgaccggcgcgttgaccgcttcaggtggctcttggaacgccagtatcgttgccgaactggtcagttggggacaccagcatctgcaagcctatggcctggggtcttatatcgccagtgcgacggaggcgggtgactacccccgtgtgctccttggagtggtggtgatgtcgttgtttgtcaccgtgtttaaccgtaccttgtggcgtcgcttatttgtctttgctgagcgccgtttacgtttggattgactcttttatcctgctttttattttgttttcgactggagtgcatcaatgaacttgtccgatgtctctcagaacagccccttggtgagtgtccgaggggtttgtaagacttacgacaaaggagctgccgcctcgttggtggtcttagaggatgtcgacctgagcttatattcgggggaaattgtcggtttactcggacgatcaggttcaggtaaatccaccttgttgcgcgccattgcagggttgttgcagccaacgatgggtgaaattgcctaccgtgatggcggaccggatgggttggcgatggtgtttcagagttttgcgttgtttccgtggttgaccgtacagcagaacgtggaagttggtcttgaagcacgcggcgtcttgccggaggagcggcggcggcgagcgttggcggcaattgacttgattggtatggatggttacgaaaacgcctatccaaaggagttatccggtggcatgcgtcagcgcgtgggcttggcacgtgcattggtggtgcatcctaagttgttattgatggacgagccgttctcggcattggatgtgctgaccgccgaaacgttgcgcactgatttacttgacctgtggagcgagggacggatgccgattgaatcaatcctcatggtgacccataacattgaggaggcggtgttgatgtgtgaccgcattatgatcttcggttccaatcctgggagggtgatcggtgagattgcggtggcgttaccacaaccacgtaaccgcttggatccggcgttccgtgttctggtggaggacatctatgcgcgtatgacggtacgctcgtcagcgcctgcgcgtgaaggcaatttcccagggaccggtatcggtatggtgctaccccaggtttcgtcgaacttgttagccggcctactcgaaacagtggcggctgaaccctataacggtcaagctgacttgccgccactatcggctagtctgcaattggaaatcgatgatttatttccgattgctgagaccttgcaattgctgcgtttggctgaacttgaatcgggagatctgcgtctgacggtggttgggcaacgttttgtcgatggtgataccgacgagcgtaaacggttgttctgtcagcagttggcgacgtatgtcccgctcgctgttcacattcgccgtgtccttgatgaccgcgtgagtcatcaagcaccattgagccgttttagcgatgagttagaggattacatgtccgaagctagcgccgcacagacgctcaaggccgtgatcagctggtcgcgttatgccgaatactttgcttacgatgagcaagccgggttgctcacgctggaaaatccgagttgaaccgagagagtatgcggcgctcgtagtcgcgcttgtactgtcatttgtgcattgaatcaattgggcatcattggctgccacgtactgttttgtttgctgtacgtacatagcctatgggtttgatttggcgctacatagtgagagccttggattttggttattgattctcgcaggtgttgctttgactacctctgctgacttggacgcgcatcagggtgcggtgacgcatccttcaaacatccttcaaaggatggaaaaacttgccatttcctctcttctggatacgttgctgtgtcgttttatggtgaaacgatcgggagacatcccgttacactgcacacatgcaacctgattttctaattcttggatgtcttctttgtattgtcctggttctgcagattcttgctttactgcggagatccgaccataccgcgctcgatcatgtattgcgggaggaacaccgtgttggccgtgccgaattgcgtgagcagcttgagaccctggagcggcaacaggaagtgcgtctggcaagttttgcacgctccctcaccgatctggttgctcgtattgatcaacgtttggatcagctgactgcctcacttggcgaagacgcgcggaagggacgtcaagaagcaagtgaagggcaacaacgtttcgcagatgcccttggacagcgcctgacggagctgacacagcgtaacgcccagtccatcaatgagatgcgtaccactttggagcagcaactacatgtgctgcgagccgacaatgcgcaacagctcgagcagatacgtgcgatcgttgatgagaagctccaaacgaccctgaatacccgtctggattcatcctttaaattggtttccgagcgtctagaacaggtacagcgtggtcttggcgagatgcaacaattggcgactggcgtcggtgatctcaagcgtgtcttgacgcatgtgaagagccgcggtacttggggggaggtccaactggataacattctcgaccaaacgctcactcaggagcagtacgcgcgtggtgtgcgtgtttgcccggatgctagcgaaattgtcgattttgcagtgcgcttgcctgggcgtggtcaatacgaagcccctgtatggttgccgatcgacgtgaaatgcccgaaggaagattatgaacgtttgcttgatgctcaggagcaagcagaccaagagttggtgcgtacgatgggggtgcaattggagcgtgcgattaaaatccaagccaagtcgattcgtgacaagtacatcgttccaccgcataccacggatttcgccgtgatgttcctgcccaccgagggcctgtatgccgaaacgatccgccgtcctggtttggccgatgtgttacagcgtgagtatcgcgttgtggtggcgggcccgaccacggtaacggcgctgctcaatagcttgcaaatggggtttcgtacattggcgatcgagcagcgttccagtgaggtgtggagcttactgggagcggtgaaaagcgagttcggaaaatttgccggtatccttgaaaaagcagaaaagcagatcaacactgtcggcaagagcctcggtgaggctggccgtaaaacccgtaccattgagcgccgcctgagaggcgtggagtcattgtcacaagagcagacgcaagtgctattggatggcttggatgtggacgcagctgaaagtgacgtcgactcggatgcttcgttctgaacttgtgtttcagtgtgtgtagtcatgcggcccttggcgagcatcttgcatgacgctgttatccatgtgacatcgtatccgatcagcgaatcttgaagctccttcagtcagcaagcggttcttggtcactctgctggtcaaccgtattgatttccaagctcgctttgaccgtgtagtacgcagatatttaggccagtcttgtaatcgattgtgaaaggtgtgtggctagcgtctggaaatgctcaatgtcctatccgatcacctcatgcgctccccagtgatgaaaacaacgctggttacccttgatacaatttgcgaaaaaaggactgtaactgctcatagcgagcaaatggtgcagcgattcgttgtcaaaaagcagtcaatgcgtaaccctctgattgctttgggtatcgcgcagcatctgtactattaagtgtgttctgcaacttcgaacagctccccatcagtcagcaccactcagtgatccattgctgcgattcagtgtttttccgacgtatctgcattctcaaaatattatcggcgttgcgctctctgctgaccaacatcagattgacagtggagtcaacgttttttgcaaccagtggcaacagtgatctatcacagcttgatcggtagctatgtgtgaaacaccactaccatacatcgttagggtgttctgagtggtcttcagcggctcaagcgcgggattggcatcgcatctaccggtaccgtggtcgagtcatgctcttcacgtaggtaggcgggcagctcactattgtcattagtgtcctgattatttttgcgcagtgcattttggatttggtaattgcggcgttgtaaccaagcgtctcgtgtgagtgcgtaatcgtctacagcaccgtcgcgcatgttgtcaaacgataacagccgagcgcgggtgtcaaccaattgcagaccctgtagactgtaacgccatgtgttgttatcgattcgccgtaatagggacagcggaagatctcctgccaagccaaaggtgtcgcgcactgtgcgcggcccaaacaggggaagttcgaagtaacgtgagttgtaccagccccaaagtgccaaagtctgcccaaaattctcggtgcggcgcggaattttcgctgcgctggctggatcaaggataccgcccagccctagcgtggaattcagcagaaaccggcccagcgtctgtaatgcatagactgggtggttttgcagcacttggttgaccattgtcagcggtgagctaaggttattgaaaaaattggtcacacccacttgcgccttctttggcacgacatgtacataggcgttagccagtggccgcgcgagattgcggtctataacgacgttgaattggtgcattgcacggttgtagcgttcccaaggatcgtaggtggtgtgagtgtcgtttggcttgggtatgttgtttgtaccggaatgaccaacagacggcgaaatggctccgtaaagcgcagcgtagtcgtcttccgcttgggtcggagtattgtctgcggtgttgttatctgttgctgctgtcgggatcaccagggaggaggcgtcctgcgtcgtgactgtcgtcgtttgaggcttggtgggaggggggggcgttacagtcatgacaggtgccgacctgtccaaagcagccactgtcggcatgacggacttcgttgccttgttggcgcaggctgccagtaacaatgaggatgcaatgagagttaaggcttgagggtgatgcatggcacgttttcgggtcaggactggaattgcagatcagaggacattctgtaggccgcgagcagctccttcagaccggagggaggggcaacaattgttggcacgctgcccccctggacacggatacgttccatcacttcggcaagcagcgcaacaccggtgctgtctaactgtttgatgcctgccagattaagttggcatacgccattacttttactttgcgcttggatttcagaccataatccgatggctgcatcgcgattgagagggccgcttaacaccagtgcgttaccgtcgcgatgtagcttagtctcacttcccattgctcttcccgacttgcaggttaccactgcgcagctctgcggcaacctgagcgatccccttttggcgcagcggtgcatcgaactgatttctgaaagtttgtacgtaagaaatgccttcgatcatgacatcgaagattttccattggccgttaacattacgtagcaggtagtcaactgcaacagggtcagctccagaacggatcagttctgtcgagactctgacattacgattgcctggtaggcggctttcggacttggcgcggaaattgggtttaccctcaaaggtcagcagcgcattgccgtaacgttgcatgagattttcggtgattgcgtcggcgaacagctttacatcggtgtccgatgcgttgcgagcgtatttccctagtactaaacgtgcagcgtaatcacgatcaaaaatagtagtgaattcagtctccatgaactgacgcagcgctttggggtcctggcgaaattgggcacgctgctgttccagcgtggataggacgcgcgcactcgagtcaatcaccatcttggaagcttggccttggttgacctcggcgattgatgatgcctgagccagcatcatggatggaaatgcggttgacagagcgtaagcgaacatgatgtagaacagtgtggtcttcattggtgagtttcttgagtgtccgtgtgagaggaggcagcgtgatcggttgtgctggtggtgttgctggatgtggatttatcgctgccgccactgaacatgtattttccgactaactggattaagtccactgctggttgagtaaatgcgatctgatccccaggtttgagcacttccgggtcgccgccaggcagcaaattgatgtaactctcgccgaggagtccactcgtgagaatgttggctgaggtgtctgcaggtagatccttgtattggttgtctagcgacagcgtgaccaccgattcaaaggttttcgggtccagtgcgatgttactgacttggccgatgttaaccccgctgatccgtaccggcgcttgcttgcgcagttgtccaatttgggtgaagtgagcggtaagagtgtattggttgccgcccatactccaacgttggttggtggatgcgactgctagcaccagtagcgaggctagggttaatagcagaaaggtacccacggcgaattcaagtcttggtccacgcataacgatggttatctcactttttgatccaacaaatgctctgatatggatggatcagagcaggttttcacttcatatttctttaaaatcttgcgtagaaaaacgctgattttttcatgtggaggacggggcaggcagcacggattatcggaataatagtgctgatagcacgaagttaaacatcaataccagcaatgacgcgttgacgactgcacgcgtggttgcgattgaagtgccctcaatggttggttgcgcatggaagcctacgtaagctgccacaagagcagaggtgccaccaaagattgctgatttgagcattgctacgccgaaatcctccaaaaagtccacgctgttgctcaatcctgaccagaataaaccgttgtcgatgcctaacacatggaccgcttggaagtaaccactgcagatggccagtgagcaaaatactcctgtgagtagaggtacagtcaatatcgccgcccaaaagcgtggcgccactgctttagcgatggggtcgatggccattagctccagtgccttgatctgatcagtcgcacgcatcaggctcagttccgccgctactgagctgcccgcgcgtccgatgaaaagcagtgcagtcagcacgggggcaagttcgcgatagagtgataggcctaggagggtggacagtgcgtcggaagccccatagagagtgagtgtgcggtagccttgcaaggtcagtaccaagccgacgaacgcgcctccgacggcgatgatcggtagcgagcgcgcgccgatcttgtagatttcacggatcagctcggcgaagaagtcgcgtgtgggcagcgagctgcgcaatacagtgagtgcaaacagaccagagcggcctagcgagctgattgaagataccagtggcattaggcggaactccggtcatatgtgcgtggtgctgcatcgaatgggatgggcccgtccggttgcccatgcataaactggtgtaccagcgcgtcgttgctggcttccagttgcgcaggtgttccggcaaaaatgaccgtgctattagcaatcacgaccgcttgatcgcaaatggggagcgtctcgtgtacgtgatggctgacgatgattgtggttaagccaagactgtcattaaggcgtttgatgagactcacgatcacaccactggcaattgggtccaaccctgttagtggctcgtcatagatcatcagtggcggatctaacgccagcgcacgtgccagcgctacgcgccgtgccatgccgcctgataactcacgtggcatcgcttcggcgacggcgcgcaggccaactgcgtgtagcttcatcaggaccaaccgttgcagcagtggttctggcattcgagtgtgcgcgcgtagcggtaacgccacgttttcagcgatgctcagatcggtcagcaaaccgttaccctggagtaatacccccaagttgcgccgcatctctaacagtgcctggggtccttgtgggattccatctccgaacagacggacttccccctcggtcggccgaagctcgccggtcagtgctgcgagcatggtcgatttaccactcccggatgggcctagcaccgtggtaatactgccgcgcggcacttgcaatgcaacattgcgtaaaacagtgcgtccgccgcgttcgatacggactccggacaattggacggcaggggttggaaggatcatcgtattctaggctaacataaaaaatatgttaatattattgaattttttgaatgggatgccggctagtttgtccaggtattaacgcgattgcgtgtgcccagttttctgtattgtctgggctggccacataattttaggttacatcgcccattgtgaccttgcgcaaatttttttgaaagtacggaagagtcccaagcgattcactttttgcatgacgccttgcgctgtgcgtctgctgaggcaagatgtcccagatgatggtcaccactgactttcgcctataccactccaatgcactcgacgttctggcgggattgctggccgaaacgttgcggtccccggtgccgggccagtcgttgttggtcccagacataatattgattccacaagcggccatgcggcgttggttgcaagccacgttggccaccacgcatggtgtcgtggccaatctggaatttttgactccgggcgagttcgttgcccgtgcattggatgccaatcttggtgccgtgccgaacgctttggatacggccgtgttgcattggcgactatatgcagcgttgtgcgatccagcattactgacgcaaccagcgcttgctgaattacatgcttacctggcggatggcgacctcttcaaaccttggacattggccgaagcactgagtgcggcattcgaaaaataccaggcttggcgttgcgactggttgctacgctgggaggcgggcgcagatccggacgatccacaggccatcctatggcggcatagtgtcaacggtgccacgcaccgcgcacgccgcatccacgactacctgaaccgttatgggtcagggacagaacaccccccccaaggactgccagcgcgactctttattttcgccaccctcaacatctccccagatgtattacgtgtcctggcgacccaggcacaggttggcacactgcacttttacctgccgaccccgaccaaagaatattggggtgatgcgcaacccttcacgcaacgcttgcatcagcccaccgactgcgtcacccagaccggagaaaaccgcctactccatgcctggggtgctgccgggcgtgatttcatgactgtgttggggagctacgaagtcgtccatccctccggcgaaatcaccgcatacgatgatccggaacaacgtctaggcaccaccctggatgaaggcggcctgcgcgatagcctattgcagcgcatgcatgcggatctattccataaccgttcggcacccgtccccgcccccttgcccgcaccacgtctggaagatcccagtctccagtttcacgcctgtcatacccgactgcgtgaactccaggtccttcatgaccggctccgtgccttgctggaacctaactcaccggagggccagcgttttaaccctcccttacaaccgcgtgagattgccgtattggcaccggacatcgacctctacatcccctatctagaagccgtgttcggtggacacgcccatagcgaccccttgccatacacactggctgatgccagcccactgattgatgaaccgctggctgaagtcttcttgcgtctcctcgacttgcccctatcccgctttggcctgcacgaaatattggacctcctggccatcctgccgatggccacccttgctggctttgacacacagaccttagagagcctacggagctggctgaccgccgccggcgcacgctggggattggatgctgcccaccgtgccgaacaccaagccccggctgacgacgcctacacctggagctttgcactggaccgcctcctcctgggtcacgccagcggcgcagatgccgatattgctggcgtcgctgcttggccggatctggaaggcagcatgctgaccgcattggacaccctgatccgattactgcgcgtcctcgccaatacccgacaacgcctgagtgaggccctattaccgacacagtggcgagaacgcttactgagcctgcttgatgcactcctgcctgacatccccaccgcaccatccggtatccagcgtcccttagaacgcttacgcagactgatcgacaccttcgccaccgatgccacacgcgccggagtggccttacccgtgccagccgaagtcgtgcgtatgcactttgccgctttactgggcgacactgatacccgcgccccactgctcacaggtggcatcagtattggccgcatggttcccatgcgactgctccccttccgcgtcatttgtttattaggcatgaacgacggcgacttcccgcgccgcgatcctgcggctggcctcaatcgcctcaccgccgaacttggcaccgcacagcgtcgccctggtgatcgctcccgacgtgatgacgactgcctcctatttctacagctattcagcgccgcccaagacgtcttctacgtcagctaccttggcgctgatcctcacgacggcagcctacgcgaaccctcaccgctgctcacagaactacttagcaccgcagtcacctaccatgccgaccccagtacagccgccaaaacactgctattgcggcattcattacagccattctcccccactgcctttggcgccgacggcgacccacgccgattcagctaccaccccttatggcatgccgccgccgcgagtattgaaggacagcgccaccctctggacccctggtgtccccgccgactcccagcgcttcccgaccccgaacccgccctgccactgcacagcctgcggcgcttctttagcgcccctgcagaacagtttctacaacagcgcctgggcctacgcctgcccgaaccccctcagaccaccgatgaatgcgaccccctctggcttcccagccacggcctggaacgccatcgactcgacaccctgatatttgcctccctactccatgaggctgacgacaccctctacccacaactacgcgcccgtgcattactcccctcaggtcccttaggccgacagcaactccacgaacgcattgaacacctgcgcccctatgcccaagcatttgcacactggcgcggtaccgcccccccgcagtcccagtaccttgaagtgatgatcgacggcattcgtctccacgcacacattcaggacctctacccccacggaatcgcccgcctgcgcctgggtccccctaacggccccgcggtactgcgccacggattagattggctgctggccagcgccgccggccacccctggcccctggtccgctttgaagatgcaggcgttgcgggcctaggtccccatctacagccatccttgcccagttcccaagcacagaccgcactgagcctactcctccgcctgcgcacggctggcctgcgccagcccctaccctttgccccctacagcgcctgggagtactacacccagcgcgacacccccgaacgtgccttgcagaccgcccgcgcccgctggcgtggtaacgaccaccaatggggcgaaagcaaccatgcagcgatccaattagcactgcgtaaccacgatccctttgccaccccgcagaccgctgcccactttgcacagctcgcaacactgatatttgacctactcaccaccggtcaggccgacccagaacccttgacctggctgcaactgcacccatgaacaccccccatgacccctatctgaccttgcccctccatggcgtgcgtctgattgaagcctccgcgggcactggtaaaaccttcaccatggccaccctcgtcacccgacttgtggtcgaacgaggctggcgcatcggccacattcttgcagtgaccttcaccgaggccgcgacccaagaactacgcacccggatccgtgaacgcctcatactcgccgcccgtctcgtcccgcaggctgctgaactgccggtgccccttccctcagcacaaccacagataccgcatccaacaccccatccccaggatgcaccccgcatcactcctggagtggccaactccacctcccctgaacccccagatgttgcgttgaccctacagatcctgcgtacccacctcgccgctacggatgagaccccacacgccctacactcccgtttacaacaggccgccgatgaaatcgacctcgcggcgattttcaccattcatggcttctgcacacgcgtactgcgcgaacatgccttgcataccggacaaagcttcattccgcctaccttactggccagtgaccgcgatttactacacgaactggccgccgacatatggcgtcaagaaattgctgatcccgaggccatccaagacctcatccacctctggcccgcaggcgcaccgatgctggctcaggacctgacagacctgctctaccaaccgcacttatctcccgcgccatcgctggaagcaccagtggcgctgcctgatgctgcccttgccgtcgctgagaccacattgcgccacctctggcagaccgagggcgcggcactgcgcagcgcactgcacaccgccttagaagagggcgtcctcaacaagaaaagctacaaagccgatgcactgaacgatctctgggactggatggaacgctggagcctcgcacccaacgcctatccagagctacaccccaaactgcaaacattgaccgttgcggccttgcaagccggcaccaataaacagggggccggacgcaccccaaactcccccgtgagcgaagccgtacagcattacctggacgcactgacgaccatcgaaacagcacgcgcccagcatcgcttacgtcgcctgcatcgcttgcgtgccgcagcccgcctccgccttaccgcactcaaacgccagcgtcgcgtacagacctacgatgatttgattcaacatgtcgcccaggcactggatggcccgcatcgcctcgccttggtgcgctccctgcgccaacagtaccgcatggcccttgtcgatgaatttcaagataccgacgtggcccaatggcgcatctttcatcacgtctttggtgataccgagcacgcacacaccgccgacctcacacccgcattgtttttgattggcgaccccaaacaggccatctatggctttcgtggcggtgacgtacacacctacctggccgccgccgcccgtgccgaacgcgcgcccccgctggagcgtaacttccgctcccgtcccctattactgcgtgccgttgaagcactgtatacccaagccggcgacgcagccttcctcaccccaggcattgccttccaccccgtacagccaggcacccactgccgcgatacagacctcagcaacgccggagttcccgcacccgcgttacaagtgtggcaagccccaccgccattggacagcaccgccaaaggcaaacccaaaccctggaatgccgatgccgcgcgcgccctgtgcacggatgcctgcgtccatgccattcaccaatggcttgccgacgcacagaccgggcgcgccctgctggatggccgccccgtgggtgccggcgacatcgccgtattggtgcgcagccaccgtgaagccacattgatgcagcaggccctagcgcgtgcgggcattcctgccgttgctgctggcaaacgcagcctattgaccaccgacgaagccaatgaagccctggcactattgctggcactgcttcacagcgctgacgaaggccgtttgcgtaccgcactgtccaccgtcctcgtgggccttaccgccgagacaatcgccacatttgaccatgacagcgttgcctcccgtcactggcagcgccaggcgttgcactggcgcgaacgcttacacagtggcggccccttgggattactgaccgacctatgcgcgctacatgccgcacgcttgctcagcctcttcgacggtgagcgccgtttgagcaactacctgcaactgggcgaactactccagcaagtccacctgcgcgccctgggcttacatggcttgattgattggttggcacggcggattgctgaagccaagaacgatgacgaaacacagctattgcgtttggaatcagatgcgcgccgcgtgcagatcgtcaccctgcataaaagcaaaggcctggaatacccactggtcttcctgccttacgttgcgattggccattcccatgctggcccaggccgttattgcgtcgtacacgatgcgcagcaagggcgctgcctgcattggtgccttgataaacaagcaccagagtggcaacgcgctgaaacagcgtggaaacaggagcagcgcgctgaagaagcacgcctactttacgttggcctgacccgtgccaaacatgcactgtggctcgctaccggcaccttctatcagacggaacgcaccgccttatggccactgctgggtgatccccaggcagtgacggcacagccgggcatcgtctttgatacagctgtaccaccggcaattttgccccgtttgaccccagaacagccgcacagcgtcccccccgcacggaccgcacagcgtgccctgctttcggattggtgggtgtacagctttacccaattggcgcatgccaaagcggagcctgctcctgatgcgggtcgccgtattgccgagccactcaccggagggcaggacgaaccagcctggccacaggatgccatccaacagtccctgcctgggagcgaagtgcccgccgacccccgttttatcggcatccgttttggtgtggcactgcatgaagtgttcgagcgtaccgacttcctagcctggagcacttggcgcgccaatgcccccgtgcctgcgacggaacgtgccgtgttgctccacgccctgcgtggcagcggctacgtggctgaagacgtggaggccggtgtcgccttgctaaccccattggtgggccataccttgaccagtgtccttcccgagggcgtgcgtttgtgcgatgtgccgacaaccgagcggcgaccggagattgaattccaatttgtcgtccaggccacggcggtggatgccttgcttgccttgctccatgaccacggcttgctacagcagcgtcagagcttcggcatgcggcgtcgcttggaaggactgatgaccggcatgatcgacctcatttatcgccacgccggacggtggtacgtcctggattacaaaagcaatcgcctgccggattacacgccagcgcatctttctgtggcgatgactaacagtgaatatgacctgcaggcgctgatctacaccgtggccctgcatcgctggttgcgcttccgtttgcgtgatgcgtatgactacgcacgtgatatgggaggcatccgttacctgttctgccgcggtatggacgcgacgcgtcccgatgcagccggcgtatatacgcaatcctttgctcctgccttgattgccgcggtcgatgcgatgttcagtggagcttgcccatgagtctgcgcgcggtgcgcttccagcgtggtgtgttgcgtcatcgctggtgctgctggttgcgtttccattggagggagggtgacgccgctgcacgtgcgatgggtggtatcggtgatttgtactgccagagtgtgcctatgacgtgtacggatgcagtgggggtaaatgcgccgtctttgattcctgccttgatcgctgcggtcgctgtgatgttcagcggagcctgcccatgagcctgcttgccgcgctcaaccaggctggtgtgttgcgtacgttggatgatgccttggcgcggagtttgtgccgtcttgatccgaagactccggacaaggtggccgctgccgctgcattggcctcaatggcggtggcgcatggtcacgcgggtgtggatctggcccatcctggattgctcgctggagagatgttcgactggccctccgctgcggactgggtgcatctgctgcgcgccagtcggtgggtggccgagccatctgagggggaggcaccagcaccgacagggcagccgttggtgcttgagcaaggggtgctctatctgcgtcgctatcgtgagtatgagcggcgtttagcgattggtttgcgtcggattgccgctgcacggttgcccccggctgaatcggccgcggtggcgaccgtgtttgcggcgttgtttccacaggcacgcgctgggcaggatcggcaggcatcggcggcggcgttggcgttgcagcgtgcgttattgctggtcacgggggggcctgggaccggcaagacaacgacgattgcgcgcctgttattgctgcgtgtcgcccaggcgcggcaacaggggcaggcgtcgttacgtattgcgctggccgcgccgacgggccgtgcggccgagcgaatggctgaaagtttgcgtgcggcggcagggtatgtgtctgcggcggggggggatgcggcgttgtttgccgcgttgccgtcgggagcgagtacggtgcatcgtttgcttggggtgatccccgatacgccgcgctttcgtcattgtgaggacaatccgttgccttatgacgtgatcgtggtggatgaggcttcaatgatggatctgccgctgatgtgtaagttggtggatgctgtggcggacgggacgcagttgattttgctgggtgatccggatcagttgccgtcagtggaggcgggcgatgtgcttgcggggattcttgccgctgcaggttccggtgaggtgttagatgccgccgatgcgcaggcattggcgcccttgttaggcgcgccgtctgcagcggttgttgcagagtgtcacgttgtccgcggcggtttacatgggcatcggatgcatctgcaacacagtcaccgtcaaggtgaggatttagcgttggcgccgttggctgaggcggtgcgtttgggggatgcgactgcggtgctggggatgttgcgtcgcggcacacttcgtggggtgcaatttcatgagggggtgttggatccgtgtgtcggggctggtcaggtgttgttggcgcattggcgtgcgttggctgcgttgtctgatccggtgcaggcattggcggtggcgaggcgtttacgtttgttgacggcgttgcgtgaggggccgcagggggcggcggggatcaatgcgcggattgagcgtctgctcggcggtggtggtgtggatggttactttcatgggcggctgttgttgatgacggagactagtcctcgtcagcgtttgtttaatggtgatattggggtgtgtcttcgggatgaggatgggacgatgtgggcttggttttccggtgctgggggagagggtgtccgcgcatttgcaccggcgaccttgccggcgcatgagagtgcgtttgcgatgacggtgcataaggcgcaggggtcggagttcgatacggtctggttgcagttgccgcgtcaggagagtcgggtgctgtcacgggagttgatctatacggggttgactcgtgcacgccatgcgttgcatgtggcgggcagtgagtcggtgttgtgtgcggcgttggcacgacaagcggtgcgtgtgtcggggttggcttggcggcttggtgtcactggttgcaacacggtgccaataggggcaggtgcgggggatgcggaggtgtttgggaagggggggcaaggggtgttgttctgaacgtggcggtgctgaggtgggtcatgaccgttgtgtggataggcagggggatgtgcggtactgcgtcatgacatagattgcaaactctgggttcaggtcagcatggaggtgatgtcttcgatgttggctgggttcttgggggcgtgcggtggagtcaggttctgtcggtcagtggtctcaggcagggggtataggtgtgtgcaatggcgtcgcctgcggaagttgttggtgattggtggctgttgcatcacggtggttcgggctgagcggtcgatgtgtgttgcgctgctgccatctttagatgatggtgcggtgtatcggtgatgttgagggggcgcagtatgggtgctgtgggcaggggtcggcgttggatcaaatggtgcgtcatgttgcggtttggttgtattgcttggtgttgttgattgctgtcttgattgatagggacagggacagttgtgcgagtgacgatggttgcgtctgttgagacgctgagcgcgctgggagctagatgagcttgttccggtgtcgatcgtgggtgcgtgatgtgggtggacgtggggatgccggtgttctgggatgggctggctctggaaggtggtgattttctgcagcgctttgtatggcgggggttagactttgaagccgtatttcatttccgatggggcatttcatgagtattcgtgttctgactggtatcactacttccgggacgccccatttggggaattatgttggtgcgattcgtccggcgatccgtgctgctggggcgcctggaacggaaagtttttattttttggcggatttgcacagtttgatcaaagtgcaggatccagagcggacgcagcgttcgacgctggagattgcggcgacttggctggcatgtggtctggatccggaaaaggtgtggttgtatcggcagagtgatgtgccggaaatcacggagttgatgtggttgctgacttgtgttgccgggaaggggattcttaatcgtgcgcatgcttataaggcggtggtggataagaatcgtagtgaggggggggatgatgatgccgggatcacggccggtctgtttatgtatccggtgttaatggcggcggatattcttctttttaatgcgcatcaggtcccggtgggacgcgatcagattcagcatatcgagatggcgcgggatttcgcgcagcgttttaatcatatttacggtggggagtattttgtgcttccggaggccgctattgatgagcaggtggcgacgctgccgggtttggatgggcgcaagatgagtaaaagctatggcaatacgatgccgctgttctgtacgcgggaggagttaaagaagtacgtgttttcgattgtcaccgattcgcgtgcgccaggggagccgaaggaggctgttggttcggcagtgttccagttgtatcaggcgtttgctggtgttgaggagtgcagtatgttcgcgcaggcattagctgagggtctcgggtggggggaggcaaaggtgcgtttgttcgagcgtattgatgcggaggttgcgccgctgcgggagcgttatgaggatttcatgaggcgtccagcggatatcgaagcaatgttgtgtgatagtgcggggcgtttgcgggagagggatgcaatcccacttttggcacggttgcgtgaggcggtggggttgcggagtttatcgctctgtatggccagtgcggtgccggtgccgcaagaaaaggtggcgttaccggtattgaagcaatatcgggaacaggatgggcgtttttatttcaagttgattgatgggcagggggcggtgttggtgcagagtcgggggtttgcttcgccgcgtgatgccggtcagtggatcgctttgtttaagcaggcggtgtctgctgaggcgttggtctctccgatgttggagccggtggctgatcctgttgttgtgctcgctgcgctgcgtcggctgcgtgaggctggttgaatggggtgttctgtggtgtgtaagtagcggtgttttagctgtggagtgctaaggcagggaggctgtgttatgagtcgatctggggttgctgtggtgacttggtgttaggtggtgtgttggtgcgcagggtggtggtgtcctcttggcagcggtttggatggttggtgtttctatgatccagtggttggcaggcaggtaaaggcactcgctaggccgtatgggatgtggggcagtgggcgattgttttgctgagtgcgtcgttgtttgttgtggggttgctgcggtgaggggatggggtgcggttgggaagctgtttttcttggttgatggggatgttggtggtatcaaatgggttgggtgttgttgcgtagggatgtaggacggttgtgggatgtttcaccgtagtgtggcgcgggttttgagcagttcacgcagttcgtacttgtcgatgtcgtccaggggctgggtcagttgtttggtgtggagtgcgtccaggcgttgttggagtagctgtttctgcatttgtgtcatcgcgccttgtaattcttgggtccaggtggcggtgttacctggcatggtttgtgtggctagtgtctgtagtaggacgtattcttcgcgttcggtgaagtgttctagcagggcgcctgtggtgatctccgggcgctggtgtatcaggtcgagtaattctagtagtagggcgatgcctggttgttttaggtcgttaatggcaagagggtatggggtgttcagggtcatcgccagggagggctgttgcaggatgattgcgattgttgtgtggatgaggttgcgtttctgtgcaggaaggcgtgtcgctggccgtgatgtggcggcaggggctggtccggggtgggcgatgttgacaccggtgaggtgtgccaggcgttgccgcatgaggtcgttaaatgcgccttcggggattttcatgagcagtgggcgggcgcgttcggccaggcgtgctttgccgtccagggtatgcagggcgatgtcgctggagagtgcgtcgaagaagaattgtgacagtgggatggcttgtttgaggcgttcgttgaatgcgtttttgccttctttacggacgatggtgtctgggtcttcgccatcgggcaggaagaggaagaaggcttgtcgtccttctttcatgcgtggcaggatcgattcaagtgcgcgccagccggctttccggccggcgttgtcgccgtcaaagcagaagtacacgtccggggtattgcgaaataggagttcggcgtgttctacggtggttgctgtgccaagtgtggcgacggcttgggtgatgccaaattggaagagtgagatcacatccatgtagccttcgacgacgatcagtcgttcgatgttctggtgtgcttggcgtacttgccagaggccgtacagttcgcggcctttgtgaaataaggtggtttccggggagttgaggtatttcgggcttttatctttgtccaggacgcggccgccaaaggcgatgacgcggccgcgtcggtcaaagatcgggaacatgactcggtcgcggaatttgtcgtagacgtggtcacggtcgtttttggagagcatgcctgcccgatctaacagggtgatgcgtcgttcgtcggtccctagggtgtctttcagtacgctatatccgtcgggtgcgtaaccaatctggaagcgtgtgcgggtgttgatatcaacaccgcgttcattcaggtatgcctggactttggggttgttttctaggtgtttttggaaaaagtgagatgcagcttccagtgcggcgtagagcgggcggctgtcctcctggtgtgcgtgtttttgctgggtttcgcgggggatttccattccggcgcgtttggccagttcgtcgacggcatcaaggaattcgaggcggtcgtagttcattagaaagctgatggcggtgccatgtgcgccacaaccaaagcagtggtagaactgcttggtcggagagacatagaaggaggcggagcgttcgtcgtggaatgggcaccgcgatgcgtattctttgccttgacgcttcagcggtaggcggctgcctaccacctccacgatatcggtacgggcgagcagttcatcaatgaatgcatcagggatgcgggccattttagtagtgtaggtggtctgtcaagtgttggtgttgtattgggggcggtcggtggtgtacggggagggtgatgtggttgggggcattcgttggattctgtcggatgttcggttcaggagtgcggtcggtgatgtgtgttggcatctcgggtgcaagggctgtgcagcacgcgtgatatggtgagcacgcaacttagcagaacgacatcgcgcagtgtcatacaccgtaacgccggtcaggtgttcggcaatgttcagtggtgggtgtctgtgatcttgtgatcacgcaatcgttcgtcgatgacggcagtcagcagtgcgccgatgaagaatacgacggatgtgtagtacatccataccagcataatgaccaatgcacccattgagccgtaggcgctgcctggtgctgcggtgctgatgtatagcccgatggcatagcgacccagggtgaataagcaagcggtgattgcgccgccgatgtaggcttggcgccagttgacggttcggtctggtaaatagcggtataaaaacgcaaaggctagcgtgtacagcagcagtgtgcttaggtagcctatcgtcggcagcatggaaggcaggtgtgtaaacgcgacttgcagtgcggttgtggcgaccatggagatgatcagcaggaagcccagtgccaacaccacaccgaatgaaaacacgcgctttttcagccatgcttttatcccctccaggcgccgttgatcggtgtgaaagatgaggttcaacacgttttgcagttgtgcgaatacggccgtagcacctacgaacaataacagtgtgctccacagtcctgccagcgtaccaaaggtgggttgtgcggtggcgttttgtaaaatcgttttagcgacggtggctgcgctgttgcccgctaattgttcaatctgtgtgatcagcgttgcttgtgccgcaggatagagcgaggcagtcagccagaggagtagtaccagtagcggtgccagcgatagtagtgcgtagaaggacagtgaggcggcttgagtcagtaggtctatctcggtgaaacgattgaccagcgccatcggtaggctttgttgcaagcgctctaggtgtttgttcagttgtttggatgaaaggaggttctccgccataagttgtatgccgtgttgctagtgcggtttacgcaatcgagttgtctgtgtgcgtcatccgttggcgttgtgtttctagcagtctggatggcaaaaacaggtgaatgggtggggggatttggaagaggtgccggaccagtgagatagtccggaatgtgatgccccgcgagtcaggatgagttgttatttaagttggtacgttggcctgaagcgtgttttctagtggcttggagggcgagagtattactgagacaggtgttttttcaccagtgcagagacttgtcccatgtcggcttggccggcaagtttggttttgagtgctcccatcagttttcccatatcggctgaacttgaggccccagtgtctgcaatcgctgtttggattgcggcaataatctctgcttcgccgagtctggctggtaggtagcgttcgatgactttgatttcatcgtgttctatctgtgcgaggtcttcgcggctggcatcgctgtattgtttgattgagtccctgcgttgcttgaccattttttgcaaaacagtgagtacaccgtcgttgtccagggggatacgttcatcgatttctttctgcttgatagcggcgttgatcagccgagtgacccctacggtgtgtttgtcgccgctcttcatggcggctttcatgtcatcggtgatctgctgttttaggctcatgtgtgcctccgtcaatgaggaaactggccgtcagtgggtggtccgctggattgatgatgtctcagggtcaaagataaaaaaccagcaacgcttgaatgtgcagtctatcgtgggacgtgcctctataggaggcgtcgattgtgtggagaaaaacatgaagaagatgcggcgtagttgtgtaccagatcagtacaggcgcttacgcttggtcacatcccgagaggtacggcgcatctggcgctttacagctgcggcagcctttcgcttacgttcttgtgttggtttttcgtagaactcgcgttttcgagtctcggctaagatgcctgctttctcgcaaatgcgcttaaagcgacgcagcgcaaattcgaaaggctcgttttcgcggactttaacgcttggcatgcattctccataaatttgagctgaaggcttagggggattggtttgcgagtaagctcgcgcaactcatgtccgccgcgccataaaaaagagggattataaaggcttaaaatgtgtgtgcaagccttagggatgtgtgtgtcgtgcaatctaggcaaaaataaatggatggtatgtgaaaatcatcggtattgagtcttcatgtgatgaaactggcgttgcggtgtatgacactgcgctctctggttttgctgcgttacgtgcgcattctgtctatagtcaggttgcgttgcatgccgaatacggtggtgtggtgccggagttggcaagtcgtgatcatgtacgtaagttgctgccattgctacgtcagacgctggctgaggccaagctttcggttgaggagttggatggagtggcctacacggccggaccgggtcttgttggtgcgctgttggtcggtgccggggtggcacgtgcattggcttgggcacttgaggtgccagcgattggggtgcatcacatggaaggtcatttgttgtcaccgttgctggaggatgatccacctgaggtgccgtttgtggcgttgctggtctcgggcgggcatacccagttggttgcagtcgatgcgattggtgattaccggttgcttggtgaaacgttggacgatgcggctggcgaggcgtttgacaaggttgccaagttgatgggcctgccgtatccgggagggcctcagttggctgcgttggctgaacagggtattccaggtcgattctgtttcactcgtccgatggttgatcgtcctgggttggatttcagcttttccggattaaaaactcaggtattgttagcgtggcgtaacagtgatcagtctgatgcgattcgcgtcgatgttgcacgcggttttgaggatgcggtggttgatactctggcgatcaaatgtgaacgtgccttggatacggtggcttgtcagacgctggtagtggctggcggtgtcggtgccaacaagtgcttgcgtgcacgattacaggcaatgtgcaggcaacgtggtgggcgtgcttgttttccgcgtccagcattgtgtacggataacggtgcgatgatcgcttttgccggggcgttgcgtttgcaggcgggtcagcagagtgatattgcggtgcgtgtaacgccgcgttgggatatggctgcgttgccaccgttggtctcgcggtcgtgccgccgatgagtccctagtttcatagttgtttaccgcgtgaaaatgttttctgcactctggcttgtttcatctcccctgaaaaaatttttctatggataaagtgtttatcgaaggtcttgagatcgacgcgttgatcggtatttacgattgggagcgacgagttcgtcagatactgtgttttgatcttgaaatgggtttcgataatcgtcttccggcagccagtgacgatatcgttgatgcattgaactataaggcgattagtaagcgtttgatcgaagtggtgcagcagtctgactgtggtttggttgagacgttggccgagtattgtgcggcggtattgcttgatgaattcggtatgcattggctacgtttgaaactgagtaagccgggtgcggtgcgtggtgcccaggcagtgggcgtcatcattgagcgtcaccgtaccaatgccgtttaagcgttgggggtgtttgggagggtgctgtttcttggatcaatttacgtgacttaagtcgctatttatgggtgatgttctcgtctccttgtgttggctgccacctcagatggtccgtggtggtaagacaaacgtgtgctgctgttgagattatttgtttcttggttcaatgccaatgtgtggggatacgtgggtaccccatgctgtacattgaagggggctgtgattttggagtgataatgttcaatgccagcattgcgattacctggacccatttgcatgatgtcttggcaccttatccttgggtctaccgtgtattagcaacaatcatgttgttgttggctgcttggtttgctaattgggtgacgaagcgggttttgctacgtggtgtgcagcgtgtgctgcgtagcagtgtgcttgctggcgaggagggcggctatggcatgcgtttgggtgtcatcccgcgcttggctaatgtggttccagcattggtgttgtctctgggagtggccgcggtgcctgatgtgccactggtggtggttgcagtggtgcgcaatgtttgtacggcttttatcgtattgaccgtggcattggcgttggctcgtttgatggatttggcgaatcaagtgtatgagcgccgtcccgatgcgcagcacaagccaatcaagagttatgtacagctgctgaaaattgtgcttggtttgtttacggctgtaatgatgatttcagtattgatagacaagtcgccgctgatccttctttccggtctgggcgccatgatggctgtgttgattttggtctttcaggacacgttgttgtcgttggtcgccagtgtgacgattaattccaacgatatggtgcgggtgggtgattggatcgaaatgccacagcagggcgctgatggggatgtgattgatattgcgctgcatacgatcaaggtccagaactgggacaaaacgattactgcaattccaatcaagcgattgatcactgattcgttcaagaactggcgtgggatgcatgagagtggtgggcgccggatcaagcggtcgctatttctggatcagtgcagtgtacgttttcttgatgattctgaaattgcaaggatgcgtgagttcagcatattgcgtgattacattgatgcaaagtgcgagagtttggctgagtggaatgtggcgctgtcaagtcaaggtgttgcttcagttaatgctcgccgtattaccaatcttgggacatttcgcgcttatgtggagcattatctgcgcgccagcccgcatgtgcaccaggagatgacgttgttagtacggcaattgcaaccaacggatcttgggctgcctttggagatctactgttttacaaataacacggattgggtggcttacgagcaaattcaatcggacattttcgatcatctgttggcgttgttgccgcagtttgggttgagggtttttcagagttccagtgacaccatgttgatggaaacggcgcaacgtttgagtgctatatcggctgcgttaacggagcgtgcgcattgacgtgtgtatgcgcacgacaggcattaagaaggatgtgtccacgatagagcgccttaattatggtgttttacgacgcactgatgttgtttagcagtgtattgaggacgtgcctatccaattcaaggatcacctgatgtggatgtgttgtcgggatatacgtccgccccatctgatttttttaatgggtgattttgctgagttgggattgcagcgagaaatgcgggtgctttgtctgtttatctttgtcagtagataggtctcatctgcagtacattcttacgtgggttgcctattcattgagtgggttatggacggaatgtagtccctggctcttgtcattattattggactgctgtttgtagacgtttgatcttcatgatttgtctgcagtgtggttggttataactatgcaggtgagcaaccttcttctggcagtcagtgtgttttgagatacgcgtttcaaggggcgctgatgacgggaattccaccgctaaataaacattttatcaaggatttcatgactgcttctgatcgcattgaatccctgctttcctgtatgacggtagaggaaaaggtggggcagttgggtgtttttgctgacatggtgcggccatttgctccagacgtaaatcctgaggccaatgtgcgtaacgctgatgagctgttggctcaggtgcgtgctggtcgagttggttcgttgttcaatggtgttggggttgaactgggacttaggatccaacaggcagcggtagaggagagtcgtctcggaattccagtcattttggctgcagacgtgattcatgggatgcgtactgtgttcccaatcccgttgggtgaagcggccagcttcgagccagagcttgccgaacgtactgcgcgtgcgactgcgattgaggctactgcggcgggtattcattggacttacgcaccggcagtggatattgctcgtgaccagcgctggggccgtgttgctgagggggcgggtgaggatacgctgctggggtctgcatttgccgcagcccgtgtgcgtggttttcaggggcctgacttgaaggcacccgatgcattgatggcaacaccaaaacactttgctgcttacggtgcggttgctgccgggatggagtatgcgaatgtggagattgcgttgcagacgctgcgtgatgtgcatttaccaccgttccaagcagggtttgctgctggtgcgctgacggtgatgacggcgttcaatgacattaatggggtgccggccagcgcgaatcgtgagttgttgaccgatattctgcgtggtgagtggtgtttccctggtttggtgatttccgattacaccgctgatatggagttgatcgcacatggctatgctgctgatccgcgtgatgcgacgaagaaagcgttcttggctgggttggatttgagtatgcagagcggcttttatgccgagcatttgcctgagttagtggcgagcggtgaggtgccgatggcgatgcttgatacgagtgtgcggcgtatgttgcagttcaaggaagtcattggtttattcgacaacccgtaccggtctttggatctgctccgtgaggccgatgtttcgtacatttcggcgcatgatgcgttgtcgcgtgatgcggcgcggcgttcaatcgtattactgaaaaacgatgggccgttattgccgttgcgtaagcaggcacagcgtatcgcgctgattggtccgtttgtgcaggatcgtgacaacattgagggatgttggaccctattcggcgataagcaccgttatgtgactttggagcagggcgtgcgcgcagtggtcgatacgcagatgctaacggtggttcctggttgcaatattgaggagccaatttctggtggtgtttccgatgcggtgcaagcagcacaggcggccgacgtggtggtgttggcattgggcgagccgcagcgttacagcggtgaagcgcagtcgcgtaccgacatcgtgttgcctgaggtgcagcaggtgttggctgaggcagtcgctgcgacgggtaagccaatcgtggtgttgttacgtaacggtcgcgcgttggcactcaggggcgcggtacgtgatgcgcaggcgatcttggttacttggtttcttgggacgcagactggtacggctgtcactgatgtgctgtttggtgactacaatccgtccgggcgtttgccggtgagtttcccttacacgacgggacagcagccgtatttttataatcattcccggaccgggcgtcctgagttaccgacgatgtctgagttcaaggcacgttggcgtgaggttccgaatgcgccgctatattcgttcggtcatggcttaagttatacccgtttcgtctattctgcaccgcaattaagcacggtatctctggcgtgggatcagacgttgttggtgacgacccgagtgactaacatcgggatgattgctggtgaggaggtggtgcagttgtatgtgcatgatcgtgttgccagtcgcgtgcgaccgatacgtgagctgaaggcttttcgtaagttatacattgcaccaggtgaaagtgtggaggtgtgttttactctcgaccgtaatgcgttggcttttaccaatccgcaaggtgtgtatggttccgagcctggtttatttgatctatgggtgtgtgcaaacgcgcaaagcggtgaggcgatacagtttgaattacttgcagctacctaattggtcatggagccaattggtttaagttaggagtgtgtcaggtcggatgctgaggagatctcaggggagtgcttgatgtgtaatttttctaaagtaaaagtaattacatgtcttgcctgctaaggttggctgaatttatttgtattcagttgtgtagcgtggcagtaatggaaatactcacgatctgaggtgaaatgttctttgatgcgagatgagtcggatgattcttaaagaaggccgttgcgatgcatcgtgcagttactcaatcaccattgatgcacaatgctttaatttaatttttttaggagttttaatgaagataggatattcaatatcagcagtgtcattggagaatgttcattcttcagattgcaatgtgcttttttggattagtcgctcatgtatgtgtagcgtcgttcatgtgagaggtatgtttttacgtttgtgtgatgaggtttgatggtattcgttgttttcaggatattttgcatggatgtgtgtgtattttagtaatgattctgtcgggtagtgccgtgtgttgaatatgtagcagtcgataagtgcttaaatgacgattaagtatgagggcttggcttggtgttgcaggttgttcaacttccgtagcgatggtctgtagagaacttctcgccatattattttcttcgtagagtggcagtacaacagtgttgtaagtaatgcggtttttaaaaatctgatgtaatgcgattcaagaaaactctatgcccatgactagtgcatcttcatatccgttttgtgcagggtagtagtgtcgatggcggtcaatctcattgaagccttcggagtgatatagcgcaattgctactgtgttagacgggcgcacttctaggaacatgcattgtgcaccgctgttgcatgatcgcttgattaaggtacgtagcaggctgcgtccgaggccgtgtgattgttgttccggagcaatacagatgttgagtagatgcgcttctttccgtgtgatatttactatgccgtacccgatcatgttgcggccttgcttcatgagtagagcaagatgcccggattgaaggcagttacgaaagatggcgcgtgtccatggaaaacagtagacacggcgttcgatctccatcactttgtccaagtgcgattcgcgtagcgtacagagccttaccggtagcggtgaggtctttagcgtgttcatttacttttttgcttgacgccgtattgtgcgcagttgcggccacagtgcgcgcttagcatgtgggtcggctcgtaattgtgccagcggccaggtcgccattatttgttgtatctgtggatctgaggggccggcggcacaggcgcgtaggagtgcgatttggagtttgtcgggaatactgatatgtccccatcgttggggtactggtgtggtattggttctgctgtgtgcaatggtcaacatttccagcccatgcgtcctgtcttgtatctcaggcattgcgccgttctcaggcatggtagacggcgttttgtttgtgcttgctggttcgggaaacgttttgcgatccagatagacggtataacctatcgcttgcagccagcagagttgttgggctgaccatggtgttgggggcatggtggcgatcattttgtttcgcctctctttttgtgttggtgtcgccacagccacagtattggcccggagagggtgtacaggacagccattgtcagtaatacccgttgtgggtcgatcatcatcaatgccaggatgatgggagctagtgccaggaatgcgatattgtttgatcgtgggtggcttgtattgcccttgaagctccaaaacaggattcgactgaccatcagtagtgccgcggcgatcgtcacggtgagtgtgatgtagcgtagatcttctccgctccagcctaacttgccatcagaaaatgcaaagacgaaggacatcattaatccagctgcagctggactggcgaggccgacgaaccagcgtttgtcgaccatttcgacttgagtattaaagcgtgctaaacgcagtgccgcacaggctgtgtatagaaatgcggctgcccaaccaacgcgacccatgatgttgctgtcgagtttcagtgttgatagcgaccagtggtacatcaccagtgaaggtgccatgccgaagctgatcaggtcggcgagagagtcatactggacgccgaattcactgcttgtcccagtcaagcgtgcgacgcgcccgtccaagccatccattaatgctgcaataaatacagcgatgctggcatcaatgaactgaccgtttgttgcggcaatgatggcgtagaacccggaaaataaaccaatggtggtaagtaggttaggtagcaagtagattgtgcgtgagccagtaatagatcgtattttgttcatatgtaaagtgtagggtgtgcgtcagccttggggtaggctaggagcatgtcgagctattctagtaagctttgatacgttgcggcgcttgatagtgaagatttgccagtgatgcttgcaagtgttgcaatcacacccccaccccagatgttaatggagaccgagggaatgaaacgaattgttgtctgttgtttattgcttgccagcatcagtgtcagtgccggcacattgtataaatggaaggatgccaatggggtttcccattattcggggactcccccgcaacgggcgcaatctttcgagaccatcagtgtgagtcatcatggtgagtcagcggttagcagccaagcggcttcagtggagagtccagcctgtgttaacgcgcgtaagaatctggagttgctcagcggtagtggtaagttgatgctggattcgaacggtgatggcaagccagatactccgctggacgaagcgcaacgtgtggctcagaaagctctggccgaggctgcgattaaggctaattgcaccgccacaccgtcacattgagtatttcttcgatgtgactcgatttgcctgttgcttaggaatcgctggcagaatacgaggtttattttccttggggagcttccgatgcgtttgtctgagtttcatctgcataccaccaaggaaatccccgctgatgccgagttggtgagtcaccggttgatgttgcgtgccgggatgattcgcaaactggcttctggtctgtatacatggtcgcctttgggattgcgtgttttgcgtaaagtggaagcaatcgtgcgcgatgagatgaatcgtgccggtgcggtagaaatgttgttacccacaattcagcctcgtgaattgtgggaagaatccgaacgctgggagaagtttggtaaccagttactcaagatcaaggaccgtaaacaagccgagtactgttacagccccactgcagaagaggcagtgactgattacgtacgacaggagttgaccagttataaacagttgccggtcaatctttaccaaattcaaacgaagttccgtgatgagattagaccccgtttcggggtgatgcgtgcgcgtgaatttgtgatgaaggatgcttactcgttccatctgaacgatgctgatttggtacgtgagtacgaaaatatgagggcgacgtatacacgtatctttaccaggctggggttggagttccgtgcagtgcaggctgattctggtgcgattggcggtgatgcttcgcaggagtttcacgtgattgctgattctggagaagatgtactggctttttctacgggatcggactatgcggccaatatcgaggctgccattgctgctacgcctggtccgcgcttgaccgcaaacgaaacgttacagaaagtcagtactccgacgcagaagcgttgtgaagatgttgctgctctgttggatattccactgcagcgtgtggtgaagtctatcgcggtgatgaccgatagcggcttttttctggccttgttgcgaggcgatcatacgcttaacgatattaaattgagcaagctaccgggcttggccaactttcgtttggctaatgaggtcgaaatagccagacatctggggagtgagccgggttttcttggtccggtttgcccaggtatgccgatccgcattattgctgattgtgaggttgcggtgatggctgacttcgtggtcggtgctaacgaggttggctttcatttggttggagtgaattggggtcgagatttgcctgagccggaagttgtggctgacatccgtaatgtgatcgaaggggatcgcgctgtcgatggtgggaagatctgtattgcgcgcggtatcgaagtcggtcatgtgttccagcttggtcgtaagtatgccgaagcaatgaaagcgacggtgctggatgagtatggcaaagctgtcaccatgacgatgggttgttatggcatcggtgtgtcacggatcgttgctgccgcaatcgaacagaaccatgatgtcgctggcatcatttggcccgcttccattgcaccatggcaggtagcggtttgtgtgattaatcccaaaaaagatccggtcattactgctgctgcagaagtgcttcttgctgagttgcagtctgccgatgttgatacagtattggatgatcgtggtttgcgtcctggcgtgatgtttgcggacatggaattaatcggtattcctcaccgtattgtggtttccgaacgtggattagctgctgggacttatgaatatcgcgcacgtcatactgcaatggttgagaatctggataagacgactttgctgatgcgaataaaagcctgattgatttgtgttattgaaatatgaatgtttcattgtaagtgttgctatgtgtttgtcagtttcaaaccgagtgattataatggccgacgctttaagtacataaatttttatttttaaaaagacctatattatttttcttcggagtcgagatgtctattgatcttactgacctgtcggcaaaacaattgatcatattgattaaagccgctcagaaacagcacagtcttttgactaagcgcgcttcaatcgataaggtacgcacagcgctgaccaaggctgctaaggtcgagggttataccattgaagagttgtttgctaaggtaccgagtggccgcagccggaaggtaagtaccactaagatgcttcagaaggctcaacgtaaggctgggaaaatttcagcgaagtatcgtaatccatcgaataaacatgaggtttgggctggacgcggtaagcggccacgttggttgacggagttggttgcttccggaaaaaaggtcgaggattttttgattaaaagaaggtgatggttttcaggattttgaatcttttttaaaacctcaaagattattcgcttatttaggtgttcgtttcgtccaagcagaaattcagtagaaatattttctattttagatgttcatatatcgtttgcttcttccttttgtaatcaattcactagatattctctcccttagagagtagtttgaattgtcttctgtattgtcatagttttccatctgacgccttcataaatgtgtgaaaactgttgatgtgtatcggttattagttagatttattcatggaaatgatttttacattaaaaaatgattttaagattcttttgagtcaagccaatgggaaatatttagtgtttcttttgctttttgcattcttttttatattgactgggattgtcatcaagatgaagtgcttgagttttaatgtaaacaatcactgtttcttttttatttttcagacctgatgtccaaacttcataatcgtcatgatgaaaggcggctcttgttttgctgtttgttttcctagaaaaatgcactgcatgaggcattcgttatactgatgtgagtgggagtggttgcttcgtacgagaagcgtttctggtaaggcgttggagaggtacatgattgaggatggtgataacatattccactgatgtgttgagtgttgaggaaaacgagagatgcataatacttttttattgctatctcattagatgtttctagtttttaagggtttttcggtgatgatggattttttgttaaggtcatcatccaaatattccaattggctgtatgtttacgatgagaaaacggctgtctgagattgggtttttctgttgactaatgccatcttggatgccttcatgttgtcgtctgactgatgttaggatgcttttctaggcagtgtgatttggtcgatatatttttatggtcacaatgattggtcgatccgttgagattttttagctccgatggttgttctcattggagtatttcaaatagttgagtgactcattgtcatgatgctgttccagaaatgttgaacgtatgtttctggggatgtccttagctttgcgtactttacttttacatccatctttgcatttttaatatgttatgttgactcccttctctgtttatctgtatccagtgttattgcttattggtagtaacgtttttatgacattcgcttggtatgggcatctcaagtacaagagtgtttcgttggttaccgtgatttttgtgagttggggcatcgccttctttgaatactgtcttcaggtgccgggtaaccgccttggcagtgttgtttattcggccccgcaactgaagggtatgcaggaggtaattactcttttgatattcgcttgtttctcaacattttatttgggtcagccactacgttggaatcactgggcagcgtttggccttattttgatcgcggttctattgatgttcagggagtgagagtaatggggtgatgttgcgtggcagtttattgttcttgcatctgtatagaaaaggatcagattttgcggcaagagttggataatgcgggtgtgaattggattctctcacttttctgggcgcatacgcagattgatgaaaggggctattgctgcttaccagcattaactttcatgcagtagccaatattgctggattttccggatgggatttcccgccttatccctgaatacggcaaagggtggaggtaggttgagcgtttgttctggtttggttgactctacgacacaatttccaattgcgcttataacgctttcgaaaacattaggtccattggtcgttatcaatgtgtaggtatggtgtttttttctatgaactgatcttgggtaagatcagtcatgacgtttttcgtgtgattaatgccatgaagtatctcatcatgctatcagtcgcataggatctaattcatcaacgatgcacacagccattctctctgaggtatgaaagcacagcgctttgtgtcggcttgaggtggtgaaaagcataacgatggtacttgtccggtttctcgttatggtgtgccttactcgttcgcttttgcttttggttggctgaatattctttccatgacttctagcaattcactctctgagaaaggcttggtgatgtaggcgcgcgcgccctggcgtatgccccatagccgatcagtgtcttggtccttggtggttaccaggatgactggtacatgttgcgttgctggctcgcgcttgagtgtgcgtgtggcttgaaacccattaattttaggcatgaccacgtccatcagtaccagatcaggtaaatgtgctttggctgcctccaccccggtgttgccatcggttgcggtaatggtttcgtgccctagtttttcgacgattctctggatactgagtaattgtgacggtgagtcctcgacgatcaaaacgcgtgccatagcttttcccatgtctgctttagcagtttagtgcgtatataggggtagctggaagggtgatgcatactggcggtcgcacggcaagggttatcttattcgatacgcactatggtacgtccgaatgatgcgcctgcgagcatcttctcgaatacctgtggcagttcatctagcccaacttcgtgtgtgcagatctgctcaaggtgacgtgggcgccacatgccagctaaccttccccagatgtgttcgcggatagtgcgtacggtgcctgacgctccgatgcctagtagagaaacgccgcgtaggataaagggcatgacggtcatatttagcgttgggcttgctgccagcccaaccgtagcgatgttgccatgcggtacagtttgtgcgactagtcctgccaagagtggtccgccaacgttgtctaggccgccaccgtagtgtgctgaggctagcggtttatcggttagtaggacttcgcgtggaagtacttgcgtggcgccgatctggtgcaggaatgcggtgtgctggattttgccactgacggcatacacctcaaaaccagcaccactgaagatgtccaaagccagcataccgaccccaccagtggctccggtaaccacgagagggcctaatgctggtgtctgatggttttcagtcaagcgtaaaagtgccagtgctgcggtaaatccggcagtacctatcaccattgcttcacgtaggctcagtccggctgggagtggaagtaatgcatgtgatttcaagcgtacgtactgactgtagccgccatctagcgtttcactgaggccacagccggtggagatgacggcatcgccttcattgaatgctgggtcggcggatgcgactacatgtccggcgacgtcaattcccccagtgagcggaaatcggtgtaggattctgcctcgccctgtaccagccagggcatctttataattgacagaagaccataacgcgcgaactataacttctcctggagttaacaactccagggcaactgtttccagtccagcacggtgaccagcatcgtctcggtgaatccggaaggcggtgaacttggctgggatggatattgcggccattggggtgaacctaaccgtattagggtagacattttgaaactgactatctaccccatagccataagtttgtacaattctcggattcattcattcattatggcggcaatgcgggagtacccgctccgcctttccatcatggagtatgcatggcttggaacatacctggaagcaagggtaaagatgcttcagagtcacaatatcgtggctcaggtcccttacgtggtcgcggtaatggcggtggtttctggaaggtgcctgggccacttaaggatttatttgatgcgggtatcctgatttgggtgctgattggggtgcttttgatcgtggtcttctctagtatccagttaattggcgaacagcagcgtggtgtggtgctgcgctttgggcagtttgtgagggtgttgcagccggggttgagcctcaagctgccgtggcctgtggagtcggtgtataaggtcaacgccaccgagattaagactttcggtaagcaggtcccggtgttgacccgtgacgagaacatagtgaatgtcacgctcaatgtgcagtaccagattaatgacccgcacctatacttgtatggctcgcgtaatgcgaatgaagtgctggtgcaggctgcccaaagtgcggtccgtgaacaagtgggtcgatccgatctcaactcggtactcaataaccgtggtcccttgtcgacagcctctaaagagcgtttacaggcatcgttggatgcttaccgtactggtctgttggtcaccggtttgactttgcctgacgcacgccccccagaggaagtgaagtcggcttttgatgaggtgaatggtgctcagcaggtccgtgagcgccttattgatgaggctcaggcctatgccgccaaagttgttcctgaggcacgtggccgtgcggctagtaaccgtacggcggctgagggatataagcaggcggtgattgcacgtgcacagggagatgctgaccgttttactcttctgcaggcccaatacaagaacgctccggaggtgacgcgtaagcgtttgtggttggagacaatacagcaggtgctggcacagaatcgtaaggtgatcggtgccgatggccgtcagttgatttatgtgccgatagcatcggacgtgccgcgtttaccggctgctaccctccagggaggggcgggcaatgcgcctccggtgtcacaggatctgttgatccccgaatcgcttagcaagccatctaatgagaacatccgtaatccgcagcgcgttgtgcgccctgcaggccgtgaaggagctgctctatgaaaaattatttgtggattgttgttacggctgtgctttttcttagtttgttcagctcgatctttgtagtgcgcgaggatcagactgcgatggtcatcaatcttggtcgtgtggtgcgttacgacctaaagtcaggtttacatttcaagatcccgttggttgagtcggtgcgtctatttgatcgtcgttttaaggtgatggccacggagccagcgcgctactttactgctgaacagaaggatgtcagtgtcgatttttttgcaattggctacattgaggatgtgcgttccttttaccgtgctaccggtggcgatgagtctcaagctgccgcccgtttggcgcctatcatcactgattcgctgcgtaaccagattaactcgcgtaccttgcaggagttggtgtctggagatcgtagtgagttgattgctggtcaattgaaaagtatcaatgctgcgactaaagggttaggtgtgcatattgttgatcttcgaatcaagcagattgagctgccagtagacagccaggtgatcagtgatgtttacgaacgcatgcgtgctcagcgtaagcaagaggctgccaagttgcgtgctgagggtgaggagcggtcgttgagcattcgtgcccaggccgatcgcgagtccactgtgttaattgctgatgctgagcgtgatgcccagaaattgcgtggtgagggtgatgctgaagctgcgcgtgtctacggtcaagctggtgctaatgaccctgcgttctacgctttttaccgcagtctggaggcttaccgaaacggtatggctgatggcaatggtgtcatcgtgctcgacaagaacgatccgttcttgaagtactttaagagcgatcattgaccggtgcttgttccggttgcggcgatgccttcgcgtatctgaaagacagattgtcaagcgatgataggtggtggtttcatgtcatttctgttttgtgcgagggcagagcggcaagcaggagcgttccattccaatgtttttaactacgtccgtgtttttatgtatgacctgtttgtcgccttgagttttgttgctgttttggaaggcttgttcttgtttcttgcgcctgctttgtggaagcgcttggccacgcagttgttggatctacctttggctcaattgcgactgtcgggcatgttcgtacttggtgtcgggttacttgtgttgtggtggttacgtcactaaacggtggctttagtggagtgtattaggcgttagcatcctggggtggtgtatccgcaacccggataatgcatcgtgatcttgcggtgcttgagctgctgtgatggtgtcttgaataaaggcgcttaacaaatacgtgtatgttctattccgtggctcctgtcggtgccagaaaaatctgaggagttacccattatgggtcagtcagttgtcgtgctcggtgcccagtggggtgatgaaggaaagggcaagatcgtcgaccttctcaccgaggaaattggtgctgttgtgcgttttcagggaggtcataatgctggccacactctggttatcaatggtaagaaaaccgttttgcatcttattccatctggaattttgcggaatggtgtgctctgcctgattggcaacggtgtagttatctcgccagccgcattgcgaaaggagattgaggagctggaagataccggtttggaaatacgttcccgtttgaaaatttcgccagctgcgccgttgatcatggaatatcacattgcactggatcaagcacgcgagaaagcggctggcggtagggcgattggtacgaccggtcgggggattggtccggcgtacgaggacaaggtcgggcgtcgtggtattcgtgtcgctgaccttcattacccagaccaattggcggaaaagctacgtgatgcgttggattaccacaattttgtgttgactcgatattttggtgtggatgggatggatttccagcggatctatgacgagatgttagtgttcgctgaatacgtcgagccgatgaaatctgatgttgcgggtatcctccatgacctgcgcaagcaaggcaagcgagtgctctttgagggggcccaagggacattgctggatatcgatcacggcacctatccgtacgtgactagctccagcacgacggttggtggtgctctcagtggtgctggtgttggtgtccaggatatcgactatgtgttgggtattgctaaggcttatgccactcgtgttggaggtggtccatttccaaccgagttggatgatgaaattggccagggtatccgagatcgtggtgttgagtacggtgcttccaccggtcgtccgcgccgctgtggttggatggacattgttgcgctcaagcgtgctgttgccatcaatgggattaccggtctgtgtattaccaaattggatgtgctggacggaatggataagcttaagatctgtatcgcttatgagtaccacgataaacgaagtgagtacgctccgttggatgcgcaaggttgggaagaatgcaccccagtgtacttggaatttccaggctggaatgagagcacgcatggcattacttcgtgggagaaactccctccagcagcccgcgcttatctgtgtgcgctggaagagctggctggctgtccgattggtatcgtgagcactggcccagaccgagagcacacgatcatgttgcatgatccttttgcttgatttcttagtgattcaaggtcggaggatttattggggataatggatgatgtgcttgtagttacacatttccacatgtggccatttgatttttccgagcctagaaagcttttgttgcctgcaatagcttgaccgagcttgcctgtattggttgatgcgcgagtattacttggcaacaagaaaggcaggaggtacctaatctcccgatgattgcttaattcagtcgggagctggtttggtcgattcggattgtttcagaacacgtgcaatgcaagcagtgcaagcttgcttcaggtgaatatagggctttacagattaattaccttattacgcatattaataaaataattccacgttgcatcattaaaatccaaggcgttagagaataaacaggtcatagcgagttgctggccagtgaatagggagagtttcaagcaccaataacacaacatgctagagatggttggggtcaacagataaaccatatcgtgttaatcgaattgccgtgttcaccttagcttatttagctgcaatgaccttggcgatttctaagcacttgtttgaataaccccattcgttgtcgtaccaagcaatgagtttgataaatgtcggatctagtgcaatgccagcatccgcatcgaatacgcaggtacaggtttcaccgcggaagtcggtggctaccactttgtcttctgtatagcccaggatgcccctcaacggcccctcactttgctgcttcacctctgtgcagatttctttgtaagttgctggggtgtttaattggacagtcaagtccacgacagacacatccgaggtggggacgcggaagctcatgccggtgaatttcccgttgagtgatgggatcactttcccaacagcttttgctgcgccagttgaagatgggatgatgttctcaagaatcccgcgcccaccgcgccagtctttattggatgggccgtcgacagttttttgtgtcgcagtggccgcatgtacagtggtcattaaaccgcgcgtaatgccccatttgtcgttgatgactttagccagtggtgccaagcaattggtggtgcatgaagcattcgagacgattggctccccgttgtagctgttgtgattgacgccgtacacgaacatgggcgtttcgtctttggaaggtgctgagatgatgaccttcttggcgccggctgccagatgtttcccggcactttcctgcgtcaggaatagaccggtagattcgatcactatttcggcaccggcatcagcccattgaagattgcccggatcacgttcggcagttaggcgaatcttcttgccgttaaggatgagtgcagttccctcaattgcgatctctcctttaaagcgtccatgcactgagtcgtactgcaacatgtatgccaaataatctggttcgagcaggtcattaatggctacgatatcaatgttactgccgaagttttgcactgcagagcgtaatatgttgcgtccaatgcgaccgaaaccgttgataccgaccttgattgccatgttcacgaagtcctgatggccccggcggggcagcgggtggaggaagtatccattctagcagtgcctgtgatgaggtatcgacctgttgctatatatatctactaggcttgctggttgagggtgggatcgaagtctgggagcaggttgttgattattgacattgcaagacgaaggactgtgtatgcttcccttttttcttcattgcgtcgctaacaatggactgtgtcagcgaatatacctgggtgtgttcttaatctacggtcgttagttcgtacactgtactttcatcatgtgttgtgtgatctaacctgtgattattcagaatcattggtattgggttgctctgtaatgtattgctgaggttgggtgtgaacagggaacttgtctccttgtttcgacatcattttattccagccaacgtgagtaccggagaatgccgagtcgtgtcaccaaggcaacccgttacacatccgcatgaatagatcttatgtgttgcggagatggttcatccatcaagattatttgtgtgaataacacgctttatagttgttggatgacatcattcattcaatgacgtgtgttgacaagttttataacttgatcgctgttgaatttttgtcgcctgccttggcagtcacgctccctgctcggcgtcattaggtgtgccatgctttggttgctttctcagtgatgctatcgatgctatccgtacaagagataatgacgataggttatgctcggtgagagtgagatcttgtgattcagtaatcagcttcattaatagtgatgtgtgtttaccgactagtatcggctcagtgttgttcagtcagattggctaggccgctgatgcgatgctcgcagcccagcgcaagaggagtaaatgaaggatgggttggccaaggtgtttggcagatcggaaaatgacacattgatatgcgccgtgttcattccttccccaccttggggaaggacgtcgccgatgatggggctggcaatgtattggtattgatattctggcttaattgatcgaagtgtttttcattttattgatttaacgtaaatataacgatggcctgggtcaccgggtgtgctaagaatgcggtgacgcacgataattatttctgttaagggtatattcttcagcctctgctaagtggaggcgtgtgcgttgagtatcattttcagcaggcttaggctgcttgtttttaattgcagagagtgatgttttatctatcgaaatttaatgtgcattgcggaaagaagcattcaattcatttgttatcattcgaaattgataatgcatttttaaaaattcacctatattgatgttggggtgattagttgattagtatggctgtgttttctgatgttctcattatcttggaaatcactaggcgtgcagagtgcaaagcaggttacgaccagctagaattcattgctttaaaataagctaagcccgcgttcagacgtgggttttttcatgtagacttccgggctgtcagtagcccgcccaacaggagatcctgtacatggtgcttgagcgtactctttcgattatcaagcctgatgccgtcgcgaagaacgtgattggcgatatctatagccgttttgagaaggctggtcttaaggtcgttgctgctaaatataagcagttatcgcgtcgtgaggctgaaggtttttatgctgtacatcgtgatcgcccgttttttaacgccttggttgaatttatgatctcagggccagtcatgattcaggtactggagagcgagaatgctgtggctcgtcatcgtgagttgttaggagcgaccaatccgaaggatgccgctctaggtacgattcgcgctgattttgctgagtcgattgaagccaatgctgcacatggttcggattcggtcgagaatgctgcgattgaagtggcttactttttcgctgctaccgaaattattttgcgatgagattgtaggcatgaatgggtttgcggtgattcccagtgtgacaacaacgacaactagtggtgagcccatcgctggcgatgttgctcgtaaacagaatctgctggaacttaaccgtgaggggttggagcgctttttcgaaaatgttcttggtgagaagcgctatcgtgcccatcaggtcatgaaatggatccaccaccgttatgtctctgatttcgagcaaatgaccgatgttggcaaagcgttgcgtgctaggttgcaggcttgcgctgaggtcagggtcccctgtgttgtgttcgacaagcactcagccgatggcacacacaagtggttgctggcgatggacactgacagcaaaaatgcgattgagactgtttatatcccggacaaagggcgtggtacgttgtgtgtgtcttcgcaaatagggtgtggattgaactgtacgttttgttcgacagccacccaaggttttaaccgcaacctgaccacggccgagattatcggccaggtttgggttgctgcccgtcaccttggtaatgtgccgcaccagcagcgtcgtcttacgaatgtggtaatgatgggtatgggtgagcccttaatgaatttcgataacgttgtgcgtgcgatgagcgtgatgcgcgatgatttgggctacgggttgtccaacaagcgtgtgactttatcgacttccggtttagtgccgatgattgatcgcctttcgactgagagtgatgtgtctctggctgtatcactgcatgcgccgaatgacaaactgcgcgagcaactggttccgttgaataagaagtatccaattgctgagttgatggcatcctgtgagcgttatttgtctgttaatcgtaaacgtgattctgtcacttttgaatacactttgatgaagggtgttaatgacaagcaagaacatgcgcatgagttggtcaaactaatgcggcaatttgactgtgcgatgcaggtgaagggcgcagcgaaggttaatctgattccgttcaacccgtttccgggcacctattatgaacgttctacggaagttgatatccgcgctttccagaagatcctgttggacgcacaaattttggccatggtgcgtcgtactcgtggagacgacattgatgcagcgtgcgggcaattgaaagggcaagtcgtggatcgcactcgccgccaagctgagttccgccgcactattgaagatcgggttggtcgagatgttgcagcgtgatatacccagggccttagcgttttctgcgttgctgattttatctggctgcttagtcatgtctgataagagggagacacgtattaagtcagttcagaatctcgctcctgtttacaacgtgcgtgatgatgccaaaacacgccgtcgtgttgcgttgactcagatgcttgggcgcgcctataaccaattcaatgcgggtgatgatgcggctgccgagaagttgctagaagaagtattgcgccaggatcgatcttcaattgatgcctggacgctgcgtgccacgatctatagtaagcgtggtgatgtggtgcattccggtgagtactaccgtaaggctgcccagttggcgccacagcgtggtgatgtactcaataattacggtgcttggttgtgtgcaaatgggtatccagccgaggcattggtttggttcgaacgtgcgatggctgatccggcctatggcgagcagccgggaactttagccaattccggcggttgtgcccttcaagctgggcagcgtgatcgtgccgatcacgatttgcgtagggcgctggagttggatccaagcaatgcttacgcattggaatcaatggcgcgaaacgaatacgacaagcatcgttattttgaagcgcgtgccttcagcgagcgtcgtttggcaacaactgtgcctgcgacggcttctgtattaaaactcgcgattcaaatcgagcaagagctaggagacagggcagctgctagccgatatcaacagcggttagtcaaggagtttcccgagactgtagccgtcgaacccaggggctaatgtattgtgatcagtgatttcgatcctaacccttccgagcatgattcgaatcctgacccttttgaacatgcgaaaggatgtggacaacgtttacgtgatgcgcggatggcggttggcttgactgttgaagatgtcgcaaccagcctgcgcatgccgatacagatagtgcgttcattagaggaggaaaactggcagcgtctaggtgcgccggtattcgtccgtggtcagttacgcggttatgcgcggtttttgaatatagatcttgatccattgcttgaacaggcgttctcgactgaaatcgaaccagccgaattggtgagttatgcgcatatgcaacgcgggaggcgcttgcttgagagcgtcacccgcaaggcaatgtatgtggtgatcaccggtgtgcttgctgtgccggtatggtatgccatgcgaagcagttttgagccgcgtgtgccacggactgcttcgttggaggtggtgcctgagcaatcaaagtccgaggctttggggggtacctcgcctgactcggggggtagttccgatagtactgcgccgtttatcgcctcgattgccccagtgccgcgtaacaacgcaatgccttcggagcaaggggggggggttaacgctgagcttcaagggcgatagctggatagaggtggttgctcccgatggaagcccgatagagaaagcattaatccctgctgggcaagtacgccattatgtgcttggccaagtggggcgtgtcgtgctgggtaatgccgttgcggtggaagtgcaagaatctggcaacattgttgatctaacacgctacaggcgcgctaatgtggcacgttttgcggtatcctccgatggctctgtgatgccggttcccagataaaacacagtacacagcgctagcgttttccgtttctaaattgcatagctcctgctggagcgcgtggtcttgagggtattgatggcgatcggtgatttgcacgatgaacaggaacatggcgaacgcattcgctcttggttacgtaagaatggtgttggcttgttatgtggtgtgttacttggttttgtttttattgcagcttggcaatggagggaggccaagcaggtcgaccaattcacctctgctgcgcagcagttcgccgttttcggtaaattgctccaggctaaagagttgggtaatgctgcccaggcgctggctaaactcaatggtgcgcctgctggattgtatgctgagcttggcgcattgcagttggctaaagctcaatcagaggctggtaacactgctgaggcgatcaagatcctgcgtaccttgccggtcgatagtcaattcaagttgattgctgatcaacgtttggcgcgtttgctggttgccactggcaaggccgatgaggcaaacaaactcctggctactcgcaatgatgatgtcagctttgagattcaaggtgacgcgttgttagtgcttggcaagcgtgaacaggcacgcgagcgttatgccaaagcacttgccatgggcgatagtgcagcgccgcagcgccgtattctggaaattaagttgatggatgtgggcggcacattacccactcctgtgggtccgatttaaatgagagatgttatgaagttcaggaaatttttcacaattgcattattcgctaccgtttttgttgggtgtggcagtgtaaaaagtgtgtttcgcggtaaagatgccgatgctagaaaggctcaggagcctgccgatctggctgatttcaccccgaccgtaaaggtcggcaagctttgggcggtggatcttgggaagggtgagggtcgcattggagtgcggcaacgtccgaccgtggtcgatggcaaggtatatgcagcagtcatcggtggtggtgtgctcgcactggatttacatacagggcaggtcttgtggaagtacgtaccggctcaaggaagtaacgcaaaggacaacaagaaatttagtaaaaaatcgatgctgcgtcttgctggtggccccggtgttggggatggtctggtggtgatcggtaccctagatggtcaagtgatcgctttggaccagaacgatggtactgagaagtggcgcgccaatgtaccgaacgaggtgattgcagcgccagctgtggtgcagaacatggtgtttgtgcgcagtaatgatggtcgcgtgaccgcattcgagggggctactggtcaacgtcgctggttcactgagcgcgagtcgcctagcttgacggttcgtggtaatgcgccggtgatccctgggacagatttgctgttcgtaggaaatgacgacggtactatcagtgcattagcgatgcatgatggaaattccctgtgggtacagtctgttgctatgccggaaggtcgtagcgaattggagcgtatggctgacgttgacggcgtccctgttctggaaggaaatactctgtacgcaaccagctataaaaacgagactgttgcgattgatggggcgagcggtcgtatgctttggaatcgcgagcacggtggagcgggtggtgtcggcgtttcttccaactatattgtggtgactgataatgatggcatcgtatggggcttggacaagccgaccggaagtgcctcctggtcgcaacctgcgttagcacgccgctttttgacaggcgtggcgatccagggagattacgcggtggtgggtgattacaaaggctatctgcactggttgcgtctcagtgatggtgcacttgctgctcgcgaacgctctgggagtgccgctatcgttgggcaacctgttgtcgctgacaatgtgcttctggtgcagagtagtaatggaaagctcgctgcttttcgtatgatgcaataacaataactacggatgttgatgcgatatgctccctttggtcgccctggttggacggccgaacgttggtaagtccaccctgtttaacgcgttgacgctgacgcgtgatgcactcgtacatgaccaacccggtgtcacccgtgatcgccactatggcgtatgccgtattgatgggcagcctttgtttgctgtcgtcgatactggtggcatggttggtaaggaagatggcttggctggtgccacggcgcgtcaggcacgtcttgctgcggctgaggctgatgtggtgctgtttgtggtcaacgtgcgtgagggtgtgtctgcgcttgacgacgatatccttgcttggttacgcaagctatcgcagcctacgttgctggtgatcaataaaattgatggtgtgagtgatgcgacggtgcattcggagttcgctcactacggcttttctgacgtggtgccggtttctgctgcgcatcgtcaaggcttggatgaccttattgaacaggtgcttgcgtggcttcctgaacgcggtattggcgaggcattggatgaggattcagagcgtatccatattgcttttgttggtcgaccgaatgtcggtaaatcgacattagtgaaccgcctgcttggtgaggagcggatgattgtctcggatgtgcctggcacaacccgcgattccattacagttgatttggagcgcgatgaatgccggtaccgtttggtcgataccgcaggcttacgacgcaaatcgaaggttgaagaggcggtcgaaaaattcagtgcgtttaagaccctacaggtgatcgaacaatgccaggttgcggtgttgctgttagatgctggggagggtgtgactgaccaggatgctaccgtgcttgccgccatcttggatgcgggcaaggccctggtcgtggcgatgaataaatgggatggcctcggtacttaccagagagagcaagccgaggacttgctctcgcgtaaactcggctttgtcaattgggctgaggtggtgcgtctttctgccaaacatggctcgggcttacgtgaattattcagagctattcatcgtgctcatgtttcggcgctgcgtcagttcagcaccagcgaggtgaataaagcgctggagatcgcctaccaaaccgcgccgccgccgagcattcgaggccatgtgtccaagttacgttatgtccatccggctggaagtaatccgccaaccttcatcgtgcatggaacccgcctgaaggtgttaccggatacgtacaaacgttacctggagaatttcttccgtaagcgcttcaaactggttggcaccccggtgcgtttcctgttcagagaaggtgacaacccttatgaaggcaggaagaacgtattgagcgaacgccagatccagcgcagacgccgtttgatgcgccatgtgaagcgcaaatagtgaggctgagtctgcctgtcccatgaaatgctgcgtggaatcgttcgtgtcgatgcttcagtacctaagctagggatgatgcctttattgctgtgctgatctagtggattctggtcaattttgcgggtgatgcgctgcctattgtgatgttaccgatggaatgcacatttgacttggctctcgttgagagcagtgccatgcgttggtgtatcaactgcgctgagtcggttgcttagagtggattgcggcagaatgcgacatagtcaatgtacccggggaacggtcgtcctggtgcacacactggacacgtcgggtctggggccagacgtatttcccgaaactgcattgccagcgcatcgaaacacagcacacgtccgcgtagcggcttgccgatatccagcagtagcttcagcgcttcggtggcttggagcatcccgatgacaccgggtaacacaccgagcacacccgcttcgctacagctgggtgcgaattctgggtacggtggttccggaaacagacagcgataacaaggcgcctgcccacgctggcggccggcatcgaaaacgctgatctggccctcgaactggtggactgcaccatagaccagaggagtgcccatcttgacgcaggcgtcgttgagcagataccgcgccgggaaattgtcggcaccgtctatggcgacgtcgacgtcctgtaacagtgcttcgatgttgctggaattcgcccttacctgcattgcttcgacctggacgcgtggattcagcgcactcaggcgccgtgctgccgatgcggctttgggaactcccaattctgcatccacgtgcagaatctgccgttgcagattgctgcgttccaccgtgtcatgatcggcgatgcgcagatgaccgaccccggcggcagtcaaatagaacgccgctggtgatcctagaccaccggcaccaatcaacagcacacgtgcttctgccaagcgctgctggccatgtggtccgatgtgaggcagacgcaagtgacgcgcgtaacgctctatgaagtcctgctcgtcagtgctcaggatagggcgtagtaatggcagaccggccttgcgccacgcatcggttccgccagcaaccgagtacaactgccgatagcccgctgcttgcagtcgctccccggtgtgccgtgagcgctgacccgactgacagatcagaacgatctccgcgtttgtatcgggtaaatgagtgctgctatgcgcttccagtgtcgcttgatcgatcccgagcgcgccttcagcttggccgctcacccgctcataggattgacgcacgtcaatgaaaacggcgccactggcgatgcgagaccgcgcctgatgcggtgtgatttcagtcatgctcatcgtggcattgtcgaataatccacatacgccgttactgtgttgctgttcctgaaggcgtcaatgtgttggatctgagcggtgctgtgcagattgctgacgcttgatttcactaggtttattgtcatgcgttgcgtgatgtcaactatcttatggtgcgtgatagtccgatgctactgccaaacgatggcagtctatttgagcgcctcttccaaggagggtgttcaacacatcacaacgactgcaatcgaacgtcttgcacgtatcagagagcaatggaggtcctgaccgtgatgcggtgtcgcttgctgctgaagttgtcctggtcgattgggtcaggggtcgcatcgtcttcctcttggggaaatgccttagtcgtgttcatcttgcttgggttgctaaccagataattgcctcggaagtaaacgagggcatcccgtcccagccttctcgtcgcaccatcaccacaactggatcatgcgggctggtgcagcacatcttctgaagcatagaaacgatgcggttgaatgcgctttgttttgatccgatgagcgcattttttaacaatggaggagtatatgtgacttatgtcacttttatatatcaacgattagcacactttggaactgggggattgctccattatttcaacttagtttctgggtcgagtattttgatgacagcatcgcaagttttttcgaccgcttccgatgagcgccttatatgcagtagcttcatagatgtgtagattgccatgcaatgtaatgccatacgcaggtgtttcagtgctggagatgtttctgggcctcggcaatcagcccaggtgattccgctgttgtgatgccaagtagaaagaacatggaaaatagtgttgatcaatatttcgagtctttggactcccattgttctcatttcgtgactcccgcttgaaacgttgttggactcttatcgttggtgccacgctttgcatagcgtgtctttctgtttcagttgcattgactgatgactacgtttgggtgacgacgcagcgtcacgaacaacagcgcctgcgcgacttggcgcagcaaatgggtcaacgggtggatcgcgccgtttccgaatcattgctgctcctgtcagacatggatcatgcgcacttggccccgtgttctccagaacacatcgcacggatgcgtgcattggtgctggctacccgctacatcacagaacttgactatgcctcgacacagaaactgagctgtacatcgtggggaccgtttgatggtgcactcaagcagacgttgaccagcgataccagaaacgatggccttgaattggtgaagcgggtgtctttaccgctgaaccctgagcagcgcctgctgggcttgcatcatggtgactaccatgcactgatgaagctcagcacctttatggattttccaattccacccggtgtggaattggcactggccactatggatggggtgctgttgctgagcactggttctcatgtgaaagaactgtttggtaaccctgtgaatcaaccagcgagtgatccttcgcatgatgtggtcgcagcccgcattcaaaaccctcatcatgattggcagatcgctgtcattgaaccaatccaacagcttgtgggtgcggtacatcgcaaagagtggctggccatcccggttgccttattggtttcattgagtgtcagcggcttagccatcctgtatttgcgccgacggcgcgctccgttgacccggttgcgtcaggcgatccagcgctgtgaattctttgtctgctatcagccgattgtttcactgagtgatgggcgttgcgtcggtgcagaagcattggtgcgttggcgccagcaagacggcacattgatcttgccggaccaattcattccactggccgagcggagtggtttaattcttcccattaccgatcaagtcatcgcagcgtccatgcgtgaattaggaccattactggtggctgatcgttcgttgcacattgcgattaatgtttcagtgaaggacattgaatcaggacgcttactggatgtattggcgcttgctttacaagacactggcctatacagaaaacaactgtggatcgaggcgactgagcgcagtttcatggatgcacgtgccgcacgcgagcatatcgtgcggctacgagaggctggatatgctgtagtgattgatgattttgggactggttattcaaatttgcagtatttgcagcaactgccattagacgctttgaagattgataaatccttcattgatacggttggtcgcgatgtcactaacacagcggttgcttcgcacatcatcgacattgctaaggaattgggcatgcgtaccattgctgaaggtgtggagcgtgaggaacaactcacctatttgcgtgcccgtggtgtggatatggctcaaggctggttgttctcatctccgttaagcgccgctgagttcgttgactatcttgcccgcaatcgcagtatgcaatccgatggctgaggcatttggtgcatgtggcatggcttcttggacgaaagtgtgtgactttttgaagttgctgtatgggtggcacggagcagcgttgctgtggtggcgataggtacatttcttgttagcccgctgggctgaattgagtgttgcagctgatctgtgttgcgatccacctctcttttgtatccagatggtgtttggagtgatctatcttttacggggtgttatcgatttcgaagccgtttgatcgatctgtgttgccattgcgtcagggggcgctgctccaatcgtcatgagcgtgcatcgtggtgatcttgtcgttccatgttctttagctggttaatgaggtgcatcgtgcttcacaacgtcggcgactgttactgatgttgtgtgacttcttctggtgagtactggacatgccgatagtaggaaggagtgcgctacagtcctgtctatttagaaagactacaagggtgaggcatgaaacacggtggtgagagggtcgtgcgtgagcgcacagtagtagatgccaggatttatccagcgaactgtttggatctattgtcgccaatggaggctggcacggctgcgcgatatttctaatggagggatacacgagtcgttgcgccgttgcgcattggcggtgctgaccagtgggagcggtttggacgatccacgtgctgtctgcgatttataccctgattttgatattcaagtgatacagcgtgatcgtggtatggcgattgagctgagcaatgcgccggcaatggcattcgtggacgatgaaatcatctgtggcgtggctgatttgctgtttgcagtggtgcgtgattttgcctatatggcgattgatcttggatcgggtgatgccgttgctttaaagaccactgatgggattacgaatgcggtgtttgcgcagttgcgcaacgcgcgcattttgcaggtatctgcagaacctaatcttgtcgtgtgctggggaggtcactcgatctcacgcaatgaatacctgtacaccaagcaagtgggctatgcgcttggtttgcgtggcttggacatttgtacagggtgtggtccaggtgcgatgaaggggccaatgaaaggggctactatcgctcacgccaagcagcgtcgccacgataagcgttatatcggtatcagcgaaccaggcatcatcgctgccgaatcgccaaatccgattgtgaatcatttggtcatcatgccggatattgagaagcgcttggaggcttttgtccgccttgctcacggcatcattgtgtttcctggtggcgtgggaacgactgaagagattttgtatttgctgggtttgctgttacgtgaggagaatcatgggttgccgtttccattgatcctgacaggtccggcgagcgctgcaccgtattttgagcagattgatcactttatccgtttgacgttgggcaaccaggccgcgtcatgctatgagatcgtgattggggatccggttgctgtagcacgcaaaatcagcgatggcatccgccaagttcgcgaattccgtaaagaacgcaaggatgcttattacttcaattggtccttacatattccgttggagtttcaacagccgtttatccctacccatgaggctgtcgctgcgttggatttgcatcatagtcggccggtgcatgcattagcggcagatttgcgccgtgcgttctccagcattgttgctggcaacgtcaaggaagaaggcatctgtcaggtcgagcagttcggcccattccggattcatggtgatccgtcgataatgcaagcgttggatgcgctgttgtccgcgtttgttgaacagaagcggatgagtctttctgggaagtatgaaccttgttatcaggtcttttcttgagtcatcaaaggcgattgaattaacatttttttgacgctcatcggttaacgccgaccgtttgtcagacagtgtttgcgctgtactgtactgacagtgtctgctttggcgttccatcctttagacattaacgctgtggagcgtttagatgccagacgatgtgcgtggcttcacgatgatggagctcatggtcgttgttgctgtcgtttctgtcttggcggcgatggcatttcccaatttccgtcaagtgattcgttcgaatcgagtgtcatctaggacagatgaactgatcagttctatcgctttggcgcgcagtgaggcagtgtccagcacgcatggcggcggtctttgtccaagtgccaatggtgatgcttgcgatggtcaatggagtcaggggtggttggtttggagtgatgccaacggcaatagcatcttcgacaagggggaagcggtgttgcgttacgtccagggcagtccccagttgttcgtgtcagtgaaggatcccttgcctattgtttttgatgcgcatggcttacggcgtgcatcgaacgatcaagtggtgacgctccgtccggatgactgcagcggccagccattacagcgtaccgtcacgatcactgctacgggtctggcgaaggtggataagggtgtgtgtcaatgaaaaagcgttccaatcgtcgttgccattgggctgcccctccccttggggtgtcgttgattgaggtgttgatcgcgttgctcgttctgggcgtcggtttgttggctttcgcgctgcttcaaacgatgaatgtgcgttttactaaaagtgcccagcagcggacgatcgccagtaacttggcttacgaattgttagacatcatgcgtagccagcgcagtacgctgggttactacggtgcgatcacttatggaagttttgatggtgttgatggcaccgactgcaattattctgaaaatgctacgccggctgccaacatggcgcgttggcgttgtgaggtggtgagtgcactgccggatggccgtgcacaggtgaatcttgcgacgaatggggaagtgacggtgacgatccgttggggtgatcaatactgggagaccgatgtgaataagcaatccaccactttcaatctgactagtgtgttatgacgatgtattcctcacgcttagcgcgtcttcgcatcaggggactttcgttgatggaactgctgatcgcactgttgattggttccatactcattgtgggggtgatccaggtatttcttgcgtcatggactgcgtaccgtctttcccaagggatcgcgcgtaatcaggaaagcggtcgtttcgcactggatttcctgacacgggatatccgcatggctggtcataccggatgtatcaatgatcaagcgctgttgtctgttgatgatggcggacacccgaatggaggaaatatccgttcgttgtttctcaatgcggatgatcgcaataccaacaatgtttctaatcagccattcccgctgcgtttcgatattgcgattgagggatttgatgcctctggcacaggaagaggtagcctgctgtcgcttggtgctgtccctgtcgtcggtagtgcgtctgattggaatccagtgttgccggctgaacttgcggctctgaaaccgatcaagggaagtgatgttctggtactgcgttatctttccgctgcggaaaacatagtgacggatttcaatccaacgtccagccctaccatcatttatacagatgagtcggttcaggggagcagtaaagtcgcgacgggtggcagtggcctgtatgcgattgccgattgtaatggggccagtgtcttccaggcgagtactgcgccgacgatgaccagtatgaatgtcagtgctggtggtctgaataagacggcgcttgatttcgtcggttattacgatcgttcgctgtcgtttttcccagagagtttggcgttgtttcgtgccgaatcgattgcttattacattggtttgaacgagcgcgggattccatcactgtatcgtgcccgttgggcttcggcgcctgctgcggttgcgttggtcaccaatgttcaggagttggttgagggagtggagtccttgcaatttctttatggtgaagattccgcagtgttgggtaaaacgatatcaagtggctatatcgatcatacgaatccagcaaacatcattggtgatgtggataacgcgctgcgttggcgtcggattggtacggtgcagatcgggctgttggtgcgtggtgctgggcaagaacgggccaattctctgaatccggtagtgaatccgacggtgctatcggtgcatatcaatccgccatcggatggtcaataccgggcggtgtacgagacaacggtcgctttacgcaatcgcttatacgggaactgatgatgaaggtacgggcatttgtcgattcgccgcttcgaggtcgtgcacgttcccagcggggagctgttttatatgttgtgctggtggtattggtgctattggcgttgatcggcatcgtcggtatgcaagttgcaaccatgcaggagcgtatgtctgcgaattatcttgcggccaatatggcttttcagagggctgagtcgttggtgcgtaatcgggagtccacgattaataatggagccgagtacgagtaccagaactgctcggttccctatgatcctgttacttgggtgaacagcatcggtaaaggcgtggttgctgatgtgctgacgcgtaacatcagtatttgcatgcaacagtgcagtgcgagcgcaggttttgatcggtccgagagtggctgcaatatgttccgtatcactgtattcagtcgggatcgtaattccattgatgcttcaagttccttgtcatccattgatactatttttgtcaggccttgagcaatgaaaaaaaacgttctgaagtgcgccttgctttgcgtcatgttcatcggtcttggttttctggtgcggcgtggtatcacggggcctggcccattggatattgcacaggcgcccttgtttacgagcaatgtggtgccgccgctcaatatgctggtgatggggcgtgatcacaagttgtactacgaggcctacaacgatgcgtccgatttggacggtgacggtgtgctggatgtcggttacaagccagataagatcacgtattacggttattacaactcgaatgtgtgttatcgcgcgaccgggacgatgtttcaggcgatgtccgttgccaatgggagtaacggaaaaaaatgctcgggtgcttggagcggtgattttctgaattatttaaccacatcgcgtatggatgccttgcgcaaggtattgtttggtggttatcgcgaagtggacacgccgacgcagactattttgcgtgcttcatatactccacaggacgcgcatagttggggcaaggagtacgctggtgcgtcgcatgacgggtatgacatctctgattatgcgccgctgagtgcgcctgggagcggccattaccatttgtttgcggtgacgacgctcagtgataatggcattccacaattacgtgtacttgccaataccacgttccgcgtttggaattgggtgtctattgagcgaccggttgctggtagcgattgctttactcctgataataagcgcgtcagctgtgtgagtggcggttctacgggtattagtgattacccgttacgggtcgaggtatgttctgttgccgaggagttacgtgaaagcaactgtaagctttatcagaacaatacttcctataagccgactggaatcctgcacgattatggggagaacgaccgtatgtacttcggtctgttgactggctcataccagaaaaatattactggtggtgtcttgcataacaatatatccagtttctctcgagagattaatccgttgactgggcagttttgcttgaatggcaactgcggcagtgggggagacgtgaaagggatcgtgcatacgatgagtagcttccgtatgctggatttcaactataaggactatacgtatggctgtgggtggatcgcgacgcgcccggtgaaagagggtgagtgctggatgtggggcaaccccatcgctgagatgatgtacgagacgttacgttactttgggggagcgactgcgccgcggcctgagtacgatattaatagcagctcgcaggacattgctacgttgcaattgtctcatcccagttggaagccgccgtacacatctgtcgatcaaggaggcagtggttattcggtgtgcgcgcagcctgcaatgacgatattgagcgatatcaacccttcttatgatgacaagttgccggggtctcattggtccaatttcagtggatcagctgatcctgcttcgatgcgcaatttggatgtttccgcggaggctgatcggatctgggaggctgaaggcggcggaagtaaattaatttttatcggggagtccaacgataattctgataatgcaccgacaccgaaagtggtgagtaacttatccacggtgcgtgggttgtctcccgaagaacccagcaaggggggaacttattattctgctgcggttgcacgctatggggctaatcacaagatgggcggcaccaaattcgtacgtacctatgccgttgcactggcttcgccgcttccaaagtttgagttcccagtcggcaatgctcggataagtttggtgccgtttgctaaatctgtgcatggttacggtatttctgcggctggcaatttccagcctaccaaccagatcattgatttctatgtgcagcgtgtggccaatatggctggatcttctggggcggattacgatgcaaccatcaatggtggccgcccctatgcagagttccgtattaattacgaggatgtggaacagggtgctgaccacgacatggatgcaatcgtgctttacacgctgtctgtcaatgccaagaatcaactggtggtgacactcaaatccgaatattctgctggcagcattgatcagcatatgggatatgtgatctctggtaccacacgcgacggtgtgtatttggaaatatgtgatcttgctgatggtcacagtaataatgggacgcgcagtagttgtgcaggacaacagccctacaaactgaatactcctcctaatcgcttgcctggatattgcaatgcgaccccgatgcctggggattgtaatggcttgccccctgttgcaacgcgaatattctctgtggcttctcaaggtgcaaatgcggtcttgttaaaagatccactctggtatgcggccaagtacggtcatgatcagggagtgatactcaatagtagtggtggtctggccaactatttcccagtgaacaatgcgctttatttgcgtcagcaggtggccaaagctttttcggccatccagagtcaggccgggagcagtggttcgattgccgtcgttggagccagtgtttccagtacctcgttcgcggtgatccccagttattccagcacccatgatggtaaggattggacgggtgagatgactgcttatcgcattgatgccaatgggatgctcggtgatgtgctgtggtcagcgagtgctggtgtgccgagtggtaccagtgcgatagccaagcgtgtgatttatacggcgctcagtcatgttgacgataccaaccgcgcatctgtagtgcgtcgttttgtcgctgaaaaattggtggagagtagtagcggtgatgtcgccactgatgctgcgcaggtctttggtcgctttggatatacaccacgtggtgttattgatgactttggtagttctgtcacgcccaatcaattagtgaattacttacgtggtgacaagagcatggagggtacaacactcaacacggcaccattccgccgtcgtttcggtccgttgggcgacatgattaattcaattcctgttgtcgcaacgcgtcgtgcgaattatgggtgggccactgcgagtgggttgcctcaggtgcagcgtgatagttactcgggtttcatcaatgctcgccagaattcaacggctgctgagcatatttttgttggtgctaacgatggcatgttgcatgcctttgacgataagggtacggagcgttttgcctatgtgcccaatggggtaatgcatcatttgggttttctggccaacccggagtatcagcatcattactatgttgatggcaaattgacattgagtgatgcctatctgaatggaagttggaagaatgtgttggttggtggcactggggcgggtggccgttcgatgtttgctctggatgtgaatagcccaagcacgttcaatgagtcaaatgtgttgtgggaaatgaacagccagaatgacgacgatatggggtacaccatggggaagccctacatcgtgccgttacaggatggcagttgggcggcgattttcggtaacggttacaacagcagtaatggtcgggcggtactctttatagtcaatctggcaacgggtcagttgattcgcaagatcgaggtgcgtgatgggattgatcccgatggctctgatcctgcaaacatgggatataacggtcttggtaatttggcggtgttggatacggatggcgatgggttggtcgatatggtgtacggggctgatctgcacggcaatctctggaagttcaacctgagtggcaaagatccgcaacgctggggtatcgcttataaagatggcttgggtaatccaataccgctgtttgtggcccgtaatcctcaaggctatcgccaaccgattacgggaggcttggaagtggcggtggggccgagtgctggctatatcatctattttggtagcggtcgttattttgctgccaatgacaacaacagcaaagacatcaatacgttgtatggcatctgggatagcgggagtgctgtcattgcaggtcgtgcagctttatcagctcaaatcatccaggttagcgatcatccgacgtcgccagacacccgcattgtgacccgtagaccgctgagttatctcaccaagcatggttggtatgtcgatttggtggtacaggggcaggatccacagggggagcgttccattgccacaccattgttacagggggggcgtgtcttcttttcgacctacgtgccgggagtgagagtgaattgtgcttcgggcggtagcaattggctttatgtgttagatgctgcttcaggtggtgccgcgctcggtcaggtcaatataccgtcccgtggctccagatccagtatgggtaatagtgatactggtgcggtttcgacgggtggagatgctccaattcagagtgttgcagtgactcgcacagcgcctagacaaccgattttttgtaatccaggtgaacagggatgtttcttggtgccggagatacctgctgcacctttggatacccgatgcagcgaagtcatcattgatccaaatgatccaaccaggtccatctcactgttcagagcatgtggacggcaatcgtggaggcagttgcgatgatggtgatcctaaagggggaacgtgtgagcaggcgcaggcggattggggcgtggcagcggtcatacgggtatcacttgattgagttgatggttgtggtcgctgtcattgccatcttgtcgtccattgcgtacccgtcataccagcattacattctcaagagccatcgggatcaggctaaggctgatttggtggagattgcccagttcgcggagcgttttcgtacggtgaacaatacttatgccggattccccgcaaccaatccgatcacccagtccccacgccaagggacggcatcttatcttttggtctttgttggagatgccacgcgcactgcgtttactgttagtgcggtgccacaaggaacccagcaaaacgacaagtgcggtaccttgtttatcaaccaggctggaattaagacgaatagccaaggtgaattatccgaatgctggtaacgtgttcccgcattgcttttagttggaagcatttcaatgttccagaaaatgctttgggaataatgttgattcagtcatgagtggctgggtacaattgccggattgcccgaatagctcagccggttagagcacttgactgttaatcagggggtcgttggttcgagtccaacttcgggcgccatatgtatcaaaggtttacgatgaattggcggtgcttatttacggcgccggtaaaactatcgggaaaactctggtttttttggaggttccacgataggtacttcatggttgtagcgctcgcgcatcgcttcagtgcggtggcctccggagcgcttatcctcactatcggtgatccctcggtgcttgaggccgtgcagcgagaagcgttcttcttctgtgataacaccttccatgatcgccatgacaatcatccgctgccatgcagtgtccagtgatgacttgcttaaccgtgcgccggattggttgacgaacaagaagcgattttcgggccgtaggggtgtagcgcgcttgtgagaggaccagcgagcagcccgatactgaacaagccaatcccacgctgagcgtaattcgtcattccaacgagtgatgttgtcacggctgccttttctccgattggataagatgccttccggtttgtggtgggcatcggtgagggtacatacctcaatgcctcgtaggcgtaagccgtaagcgaatgtcatagcggcggccaagtagggagcgactgagccaatgcgatgtgcttggtactggcctcgttcggcggcaaatgcatgtattgcagtaaaggtttttaaatccggcatacgatatctggcgcgttccttggcctgtttgactccatgcgcgggattggtcgtgcaatgaccgtgccgaataccccaggcgaaagcgcggcgtgcataacgcagcatatggtttgccttggatggtgccggctgaatcgcttcacagtctccttgtgcagggcggccttgcgcgatgacttcaaccaagcgctgccacgtgggtacattgagcctgttaacggctttgcttcctaatgtggtgttgtctttgagtagaaaactttggatggtttgtgcgcaccattgatagtctttctgggtggctttcgccaaccctgcaaactcgcttgagtgatgaaactgattaaacacgtcactaacggttcctttcacgttgcctgtgtgttgctgttcaatgatggcgtgcaggtcagataagcgtgctccgcgacctgcgatggttcgtttctggtgccgcccgccctctgggtgaggtatcagcgtataccagcgtccatccccccaatagattccctttgggattttggattggtcgatgtgtggcgggatcgacgggtgatacttgcgtggccgaggcattacaccaagtcctctggtcggtatggtgcgtcgtctaggtctgtaccgatccccagtgcggcattgagtgcttggagtgtggtccagattccaccctctccgtcgtacttgtaggggatgccttggcggcgtgcccattcttcgacgcgcgcacgcttgactttttttcctctgccacaaagcagctgcaaatcgtgaaacgtgtagatatccggcaggcggtgctcaatagccgacagggtgtcatgcatttgttttactggcgcattcatcattgtctgatccctgctcggctaaaacggtgggtcgtcatcgtggaagtcgtcgcctgcataggcataggctttatcgttgttgcgtgcctttgccggtcgccgctgtggcgtgatgccgctggagccttcattacggctgcccagcatgtgcatttggtcagcaataatctcagtgacataacgctcctggccatcattgccggtgaacttgtcgtaacggatggtgccctctatgtagcactgcgatcccttatgcagatagtcaccggcaatctcgcccagttttccgaaaaacttgacgcggtgccattcggtccgctcctggggattgccctctctgtccttgcgtccgctgctggtcgctaggctaatgctggtaatcgtcataccgctttgggtgtatttgatctccggctcgttccccaggttgccgacgaggatcaccttgttaattccgcgtgccattgtgagcgctccgagggggcaatggatggggagggggcaggcggacgatgtccatatgtggcagtgagcaaacagcatcagtgacgttggcgttatcgttacttttcgttagcaacagccaatgaatgtttggcgttgcgtggattaatgagaacaacgcattgcgccattgctgcgggacattcttgtcgaacacgtcaccgcgtgagccgcataacacaggttgtcggcatggtttgataaatccatgcgttgtctgcatattttcatctgtaagcccggggtattgactcttgatcttttcccatatgcttaattcgatgctggtcatacgatcccagcttaaggggcgtttccagtttcttttgctggtccgcttacatggtttgcctgtttttgtagggccaatccacggattgaagatgatcggtttaattaaagattgattagtcattgctttttactttttctagggcgttattaaagtgaccggtcgttgtcatggatatttctgcctgcggcttggggccgtcggcccacgtccaggtgcgaccgtactcaatgtgctggcgttttccggtcacgcggtgttggcgttcggtgggccagtccatccaattacgcgcggtgattttccatagcagcgacatcacgcgacctccatgacggaatcatttttatctgtattgaggcaaacatgagtgcgtaattcgatgcgttcaaactggatgacccatacccacgtgttgggtagccactcaccgtgcagcctgcaccagaggtcacgaaaagcgctgctggctgtgtcgtgagcagtggggttgggtggtgtattccattgaggtgggcaacacagcccttccgcgcgtgcatctgcctcagtcatgttgtgtaactgctcaatgcgtacattgttaatgagcagcactagacggctggccaagcgtggcatatggatgctggacatccagcgcggccgattggttaccgtctctggtaatgcgtctgcggcgtagcgaacaatgcccgttacctcacagggcgtataccgttcgcgtacccacagtcgatctcctggtgttccgaaagggcatgggcggttggtcttttttgcaatacgccgtgtttgtgtcttccgtccttggatgatggcgttaaccattggggcgctaaagataatggggcgctctttcatgctgcctccttgtttagtccattcctgataaacgccctatcacgtatcttcttgtcgagaaaaatctctgtacaggactcaatcacggcgcgcttacctacggatgctccacatccaattatttttgctccacggccaacgattgctcctgcaccaatagtgacgcgcttaccaatctcactgctatctcttatttggactctgttttctataacgacagcatggttaatccatgaacaacttccgattaatactgatttaccgatggacgcgctatctcttatccagcatttataatcaatgtatgatcctgcgccaataaatactcccgtaccaatctcggtatgatttccaatcattgccatttcgccgatgacggaatgttgaccaatgatggctcctccctcaatgaatacacatctaccgatcattgcatcaggaaaaatgaccgcaccttttttaatcaccgcgctgcgatgtactttggcgctagtagcgacaatcccacctttaccgccacctggaagaatccaatgccgagcaggggcgattaaatcatctgagaattcgtgattaaatgtgttattcattagtagctgtgtattcaaatttattagagatggctgatgtactcatttatctttgatgagcatgattttttatgaaatgacctggatatgtattacgaacctgttggtgtttgagggagggcatctgtgcaagcgatgggccgcaacgcttcggcaacgtttgtgagacaaaaccaccgtgcgtctaaatcattaccgtcgttatcagaacttatccaattcaaatcggccatacgaagccattggatgaatttatgattgacagcgttatttccattgatcgtgcatgtgatagttgaggtgggggctttggtgagggttgttgtgcgatgcccgacggagtcagttttgctctctgtggctgcggtatcgacactgacatcaatgtgatggcaccgggtggtggtggtatgcagaccaatatcattgggagatgtcgtgcggggcattccgctggccaggcgcacctcggtgtacactttgccgggtgtaatatcggtcagtgccgcggtgacttgcgatttagcgatgtaatactgatatatcggcagtgtgatcgctgttaagacggcgataatgacgattaagatcattagttcaatgacattaaaaccttgctgctttttcatcatgcatccttcggtaggcatgtctttgctttgtagaggattgattgctcttcgagcgggtcggtttccttttttttgctcgtgatcgcagtgaggtaaaaagcatccagcgcgcggaggcaggcggtggtgttattcatggcgcatcgcctttggcttgatcacttgttttttacgtgtattagcgtgttgcttgtctttgtcggtacgttcccgatgtccgtcggctgttgcttggcgcctgctgcgtagcgggcgtatttttggcgctttgtcagcacgcagggatggcagcacgtctaccttgccgccgttgcgttggaattcggtcatcgcctcagccagctgcgtgcgttcgacttctttccctggtggggtggagtagtggggaccgatcatgtgtgcctcacgtgctcattgagcgattgcggcggtggttcggtcatctccaatacgagggtatcggacaaggggcgttcaaagatggtcagtggctggtgttgggtaatctccttccagccagcgttatgcagggcattgcggatgccatcgcgtgtggcgatgggcaacgattgggctggtttgccgagcacgtcgttacacaggccctcaagagtgaaggggtgtttttggtggtgcgcccaagtcagcacctcattgaggttgatgttcacgggtgtctctcctgtaggtgatgtgggtgcagcagacgtgtgcctgcgtgataggcggtggcgccgctgcgtccgagtgcaaaggcatgctgtgcagcacagaaggcgcggtggagtgcgtttgggctggcgtgggtatggatggcgtggtggcgcaaggcttggcgaacggcgcgcaggcgttgcggttctgggagtgggatgagggtgtggttcatgttgcttttccccctccgcaggtttccacgcgtatgttgttttcatgtagccacgcggtaatggctttcaacggctcgggtgtgacggtgtaatgtgtgagtccgataatcaaaccgtctttgtaaacttggggggttgcgtcgtaatacgcggacgcgtagccggtggactgcgcgaccactttagggttttgtggattcgtgatgagttgtgcggtcaccagattgaagtggctgatcgatagggacagtgtttgttgatctatccctgtgctgaaatcgcgggaggttcgcggttcttctttggaaaaggtcatggtgaattccttttgttcacttggtgatgcctgaggcagtgcctgcgctgctaactcgaaggctcttgtgatgcattgctgaaatgcggggaagtggctgaggtcgataaagtgagtgggtgcggtcatgactcacctgcctttggcgtagcagtaatgtcagtacgcatctggccacggacagcgcggacgtgatgtctatttgacctaagttctttaacagggtgtatagaaccgaatttaacgacccatgccattttctccggggcttcgtcgtctggcgtgctagtccacacccaagggcattcttcatcccaataccaatacgcattcataggcgcaaccgatagcgcctcttcgcgcgtaggcgcccgccaatcggtgtaaccgccgactcttgactctcgacataaccttgctgggccgcaaaaaatgcctatgaagttagtgcagcgagccataacgtgcggctgccactccagctccgtatgctcatcccgcgtgatgatgtgcttgccgtatttgtcgtagattttggtgaacctagcgcccacgatggttggggcgttttcgaggggcgcggtgctcatacggccgcctcgttactagcggaggcgttgcatcccccgcatgtatttacggatgggggtggtgaatcgaagagtgcttcccgtgcttcataagccgccttcacctgtggatacagcgggtgcgctggatgcacatgcatgtagccctctacctccccatcacgcaaacgcgcttttatttcgctgtcctgtcttcccccaaaccatgaccacacgagcttgctaaaataattgcggtagaaacaaacgatttctaacgtgccttctggcgcttcccccccttctgcctcgcaatagtaaacacctgtcctcacgccaccttcctcatccctgatgcagttccagaagaacagtggtgcttttctggtttcggatgcggtcgtggcgctcatgcggccacccccatgctttcagcggcctgcgttgtgggctgcttttcttcctgcatgacattggctttagcggcagcctttacctgcgaatacagcggatggaaggggtggacgtggatgcgatcacacttggaaaagcctcgcattaagtagttggtttcaagggccttaaagcagttgagcacctgcgggctgaaacttgtgccaccagtggcatgaataaagatcgctttttctgagtctgttactgccccttctgagtaataggcgggttgcagctttttgcccgttgcgtctttgatgccgttccagcagaacagcggcgcttgttcgatcacgcgggcggcttctttggctttgtagtctgctgttttcttgatgatgcttgatgtcattttgctatctcctggcccctgccgctgggtgcgggtgtcgtggggctacggagaaatttaggcattgcctaatagaattgtcaataggcaatgcctaattttccgctaaatgatggaaaacccagagttaacagggtttgtgttttcatgtattgctattgattgcattattagcctgggcacggcgcagatggcgtccctctataacggcctgcgtcaccgcttctctcaattggaaagcggcattgtgaaacaccctcaagccaggcaagagcagattgctgcctgggtcaaacagcgcctggagatagaaagcgatgagccgcctatctttgttgccttggatattttgtgtgagaaccaggtgacgcgatcttatgccgatctaaaggactatccatcgcataaactgccctggttcaagcgtattacggctcagtggttgatgtgggggaatgcataacttgcggggtaaacagtcaagcgtcactatagacaaatgaatgatgatcataaaataggtagtggaagcacgcacaatagtgttcctgaacgtattgccaaactggaagccgttctaccaacgctagctaccaaaaccgatgttgagaaagctagccatgaggtaaccaagtgggtagttggcactatggtaggtggggttgggctatttatcgtcatcatgacgtttgtgcttaacaatgcggtacctaagacttccgctcccacagggacgcagccatccccaatcatcatccaggttcctgctcaagcattgcagccgccgccgcaggggaaatgatccgtgcattacaatgcgaggtatgaacacgctcatccgcaattttattgaaagctgatgggtgagggcaaagacaagaagagcacttcgcttgtaaagcgctgccagcaaggcgtcggtaggtccacaaaccgtgcgaggtcaatattttggcctatttcctggctgaggttaaggcatccccacgaatggtctaggctaagacctggcataacgtcaaagattgcttagtcgaagccctgcatgatctgtttaggaagcacaacgtgccagtttccgtagagtttggtgaaggtcggtagcatggccgagataaagcaaggtgtgccaattaccccctctgtagtgcagtgggcgcgtgaacatgccggctattcgatagatgatgccgcgcgtcacttcaagagaattgctgcctgggaagcaggggaggcgctgcctacctatgttcaggtggaacggatggcaacgcggttcaagattcccgttgctgtcttcttttttccgaagccgcccacattgccgtcggttgagaaatctttccgcacgcttacggtagaagactttgctgctattccgcgtacggtgcgattccttttgcgtcgtggccaagcaatgcagctcaacttagccgaactgaacgactccaagaatccagctgggcgagtgatctccgccgacctcaagttccctcctaaagtttctttagacaagatcgcggaaaaggtgcgtgcatatcttggcgtgagcatcgaagagcaagtgagttggaagagcttcgaagaggcgttggaaaagtggcgtgaggtttttgccacgaaggcgggggtctacgtctttaaggacgcgttcagtgctcccaattacttcggcttctgtctttacgatgacgagtttccgatcatctatatcaacaatagttcgacgaaggcgcgacagatttttacgctcttccatgagctgagtcatctgttgttccacacgagcggagttgatctatccgatgatcatttcatagatcacctaggcaatgccgagcgcaatatcgaaattagctgtaacgacttggctgctcgcgtactggtgcccgacgaggtgctcgacaatatgcttaaaggcacccaacaaattgatcggtcgcttgcggagaaattttcaaagtacttaaacgtaagccgagaggtgatctatcggaagctgctggaccgtaaattgattgatgcggaagaatacaaggccgccgcaaaggaatgggcagcgcagatgaaacccaaggatacgaagtcgtcgggaaattactacaacagccagcgcacctaccttggccagcgttacattgacttggctttcactcggtactaccagcaccgttttgatcgtggccagctcgctgaatatctgaacctcaagccaaagagcttaccgaccttcgctgaaaaatttgcggggggaggtctctgatgtacgtattggacactaacgtcatttctaatttacacaagaattactaccgcaagcggttcgtttcgctgtggaaggcattcgaccagctcgttgcggacgacaagatcacttcgacgttggaggtctatcgggagttacacgaaggtgtgcttggagctgataacgaatgggctaaggtcaataagaacctcttcacgacgcctagtgcggaggagtgcgccttcgtcacggagatatattcggtgccccacttccagaacaacattgagacgcagaaattcttaaagggcggcctaaatgccgacgcgttcattacggcccgtgcttacgccattaagggcacggtcgtgacgatggagcggctcaagccaaactccgtcaagatacccaacatctgtgagcactttaagatcccatgccttgacctcgaaggtttcatggagagcgaaggttgggaattctgatcagccctggccagaatcgctaaaggtattgccccgatcaaagctcagtcctccttaatcaccatccaacttcctgcccaaacattgcagccaccgccgcaggcggccaagcagccttaatcatcagttgccatttagtcagagtgttggtattacccctttggggtgaaccgctgcgcattttggtcaaagggcactaacggcaacgtgcatgtgtgtcgcctggttgatgcgctcaatagccttgacaaccattacaagccgctgtttgcgatttgttttgatccctattgccaaatccactcactatctgaccaaactagccttaagcgaacttgttcaggctctttttcgagatcgcagcgccagttgtgcgtactgttcaattaagtccactccacccgctagtgctggtggtgcagccgaaagtaatgctgcacgctgctgcgtgggaagcaagagtaggtcaaccgccgcgcgagttgctgccgtggcttgttgatatgcggcccatgctacggcgctggtgttatcggctgacacactcgactttttggagctgtgatcaatgtctagccagccaagcggctttccacactggatttcgacgaacctggctgtgtccgcacgcattccgcgaggctttccagtagcggaatgggttgacccatgtatccactggttgacttgcgaatcagaacgatcaagtcgctttgcaagcgcagtgattgagcctagttcttcggccgcctttgccaagttttctcggcgaatgtcatctataagtttcacgatgcaattagattgcctaaggctaataacgtgaattggctttaggcttgttgttttgatccctattgctacatccattcaccatctgaccaaactagccttaagtcaacttgttcaggctctttttcgaattttctgcgccgcctgtgcatactgttcaattaagtccaccccgcccgctagcgctggtggggcagcggaaagtactagcgcacgctgtcgtgctggaagcaagagtaagtcaaccgccgcgcgagttgctgctgatgcagcatgataagcctctgtgatgtccgtacctttcatagggggcgctggaactccaccgctgggccatgcttccaatccccaatgcgtcggccctaccacatccgagaaatacgaccaaagactaggcaatttctccttactgattcggccttctttgatccaaccatagaccgatggggcctttacgccgaagtgttccgccatctttgtgggggtgacgcccttcagttgcatggcttgtttgatggcccgccctagttgttcacctgtaagcattgcctaatagtcaatacggccaagaatttcggcaatgcctattgacattaattaggcaatgcctaaaaatgtttgcatgaatgaaccgattgccatcaatgttgcgtgtcaactggttggcggccagtctgcacttgctggcttgcttggtgtttcgtcgccaaccgtgaaccagtggtgtaatggtgtcagaccagtgcccgctgagcgatgtccttccattgagcgcgtcaccagtggcgaagttacctgtgaagaactgcgcccagacgtggattgggaatatctgcgtggcacagtcgccgcaggtcaagcggaatccgacgcctgcatcacagaccacaggccggaggcatccaatgccgcggcctaaaccatctgctttcactctcaagagtcaccccgtgcatttcctgatcgagcgcgcccgtcttgcggtgcgtgattggttgaccgcgccgagtcttcaagagcgcggcttcaccaaagacctgtctacattgcaggctcaattccatagtgacctgcttagcgacgcagagcgtgtctccttctttgtttctctgaagaagcagggcatcacgccgcggcgtcgctgcgtgcctggcgagtcatatggatacacctgcacatgtggggcgatcgacggcaacgcgtgcacgtgcctggagttacgccgcgaagtccgcgcgtggggggaagtgtgttgagtactgcatctaccagcacgtgcagcgctattttcttgatggcggggacagggcgtgatgttcggcatgacgaacagggtgcacctgccgttggaggcgcgcatgaagcgtgagcctcgttttctgccgccgctacaaagcgtgatctatggatatacgcggcgcatgttggaccaaaccgcaatgaatgcgcagtcgtttgcgatggtgttagccgagaaatatctctcactcaccgcccctgacgtgcgcggcgttgcgttgcgtattggcgatgatgttgccgaagacatgcgcaataacgcgcaggtgctgcggcgttacatggatggcacggttaagacgcttcctgcggatctggtggatgcctggatgttggcgctgcctgagccgtatcgcggcgaatgcgagcgcgacttggcgcggcggcgtggggtgttgccggtgcggctgcccactgctaaccctgcggcgcgagtcgtgggtgtggctgagttggtgagtgaatttgcgcagttgttggaagtgattgcaccggctttagccgatggccgtattgatacaaatgacctgccgtttgcgcggcgcatcctggatgaatccgacgatgtgatcgcggcggtgttggggattcgcggtcaagtgcaggcgatgtttcagcaggagaacacggatgcgtaaggcgtgttgtgccgcaggtcatcacggtcaggaacgccacaccgttgctggtgaggaggccgcatgatggcccgtcaccgtttaccgagtggataccgccgtcaaggcaggggcacgatgacgccgcggcagtgcgccggattacgtgcggcactggcggcgttgtattccagtgagcctggtttgagcggtgcggcggcattggccgcgcgtgaacggatgtgggtagacgccgaagcatcccagcgcaagcaaggggtattgctgttgcgggggggcacatgagtgtgtcgcggtgtttgggtcaggccgtcgaagcgctccgtgatcagccacgggcacagtggaaggcgtacatccagacgctgccgcaggtgtgcccgcgcaccacctgtacagccgagccaggatgcagggaatacgtcgccgcgtactttcgcgtgcaatgggggatacaggtcaaccgtgagcgggtgcagcggcatgactagggtggatacgcaggcattacgcgcgcggattgatctggtcgagctggtgggccgctctgtgacgctgcggcgtacaggcgctgagtacacgggcttatgtccgttccatgacgagcacaccccctcgttcacagtgattccccataaagggtttgtgcattgctttgggtgtggcgcgcatcatgatgcgattggctttgtgatgcgttacctcaacgtggatttccgtgaggcggtgcgtcagcttgatcgtggtgccttgccacaggccgagcaacaggcgccgcggcagcggccaaagtatgtacctgacagggtctgggtgccgttgctgcccgtaccggaggatgcgccggaggtgatgcgtgatgcgcactggacggtgccgctatggaatcccaagcggggcaggcccgctcgtctgaaggtgcagcgcctggatgcctaccgggatgcgcagggccgtttgctcggctacgtggcgcgggcgcagatcaaggatcgggacacaggggcgctaaaaaagtggacgccgacgctcacctggtgcgtgagtccgaccggcgcgcggcagtggtgtttgcagcattttccagcaccgcggcccttgtttggtttggatacgttggcggtcaagccaggggcgccggtgttgattgtggaaggtgaaaagtgttgcgcagccggcgctcgcgcgtggccgcagtatgcggtagttgcttggcccgggggcacgaacgggatccgtcaggtggactggacgccgctggccgggcgcgatgtcgtgttgtggccggatgcggatgaagtaggccgcaaggccatgctgggcaaccgcacggatgccggtgatgtcacgccgggtgtggcgcactacctgtcgcgcgtgggggtgcgccgcatcggcctgattgacacgcacgggtgcagcaagggctgggatcttgccgatgccttcgagaaggatggctggacacccccgcaggcggcggcctgggcggcagcgcggcgtgttgacgtcaatgtcgtgcggggaggggggtaatgacgaggccggtgatcacgctcctggatggtggcaagggccggacgcatggcggcggcggtggtcatggcggtgtgcccgggtccgatgactggacgcagcagttaacgcgcacccgcgacggtcatgtcgagggcacgatgcataacctcatcaccatcattgagaacgatgagcggttgcaagggttgttctggttgaacgattccagtaaccaggtggtgatggcccgtccggcaccgtggcatggcagtacacgcgatgagtttgtggatgccgacagtagcgagcttgcggcatggctccagcatccagagcgctatggaatgaagtgcagcgatgacaacgtgctcaaggccgtgattgcggttgcacggcggcatcggcggcacccgatccgtgactacctgacgggggtgcagtgggacgggacgccgcgcgtggagacgatgctcatcgacatgttcggtgccagtgacagcacctatgcgcggcaagcctccttgtgtttcatggtcggtgccgtggcgcgggtgctgtgggtggatcgcaataatccatccattggggccaaggtggatttcatgctggtgctggaaggcccgcaaggcaaacacaagtccacctccctcagcgagttgttcggcacctactggtttgtagaaacggctgagtcgcccacggggaaggacttttatcaggtcatccagggatgctggggcgtggagatcggcgaaatggacagcttcggcaaagcagacgtgaccgcggtgaaagtggcgatcacccgacgtaccgataaatttcgcgcgccttacgaacgcctgccgagtagttaccggcgggagtgcgtgtttgtcggcacgaccaatgatcgggaatacctgaaggatgccaccggcgggcggcgctttctgccggtgcgtgcggatggcaacgtggatgtctcgcgcattgtggccgagcgcgatcagctatgggccgaggcagtgcagctgttccttgatcgcttcccatactgggtactgcccgatgacgcccccgccgagcaggccgcacgctacatcggcgatagctgggaggcccgcgtggagcgattcctcgccggtcaatttcgcaaagctggggatgggagggagattgcaccacagcggttgaagttcactgcagggcgtgtcctgtggacgaccaccgatgagctgctggagtttgctatcggcatggacccggccaggcacgacacgagtgcccagatgcgtgttgccaaaatcatgaagcgtctcgggcgtgaccctgtgcagggggacggctgtgtcgaggatacgtgggatcacctgcggaaacgttggccggacacgaagacgcgagaacaacgttgggtgcgcgaaggcgcttgcattaacgagggagcgcctgtgtctaagccactggatgacaacgggagggatgatgcgcccgatttctgagccgccattgtccacacctgtccagaccgtccaaacctctgtccagacctggaacgagcaaccgcgggcctgtccagaccgtccagacctttttgacgtgcgcacgtataagggagcgtgtttcatccatccccttacatatccctctaggtctggacagtctggacggtttggacaaaccaatcacggcgcgggtttcgctgtccagacctcttcacccacgtttggacggtctggacagcagagcggtgggtcgggatttctgtggctgccccccgtggcgggccgctgtcaaaggttcctccgtgggggtctgcatcgcgggcaattcggaccccgttttgcgtgcatgtcctggttcccaattttggttccggtaggggcgggggagttccgatgagttccacggtgaccatgaccaccgccgaatacgccaagcaccgcggcgtcagcgactcctacatccgccggatgcggcgcaaaggcaatgtagtcctgggcgaggatggccgcatccacgtgaacgccagtgacaccctgctggatggcatgacgaatcccgtgcagggcggcaagcgcggcatgaccgaccctcctgcctctggcgtaccccccttcaccgtgatgaccccacagggcattccagtgcaagaagcggtccgccgcgagcgcgtcgcgcgtgcactcaaggcagaacttgatctggggaaagaagccgaacaactgacctgcgtggatgaggtcaatcgcgccgtcttcaccctggtacgccaagcactgaaccagctccgcggcatgagtggccgactccgaaaaacactggcggcggagaccgatgcgggcaaagtcacccagatcattgataccgacgttgcccacatctgcaagcaaatgcgcgacgccgccgcggccctgctgaaaaccaacacacccgaggccgcccccgtccaagccgccgatgccaacgacaccctcgaattcgaggaagaaggagtatccggatgaatttcgacgacttccccgacatccaactggccaacgcttaccacaccgtctccaccgcctggcagcacgcctgggaaatgccctcgcgcttggagatcagccaatgggccgatgcctaccgcaagatcgcccgcggctcaggcgctgaaccgggccaatggcgcaccgaccgtcaccccccgctgcgcgaaatcatgaattgcctcagcgaccacacccccgtgcaacaggtcagcttcatgaaatccggccaaattggcgcgaccgaaatcggcatcaactgggtctgctacgtcattgaccgcggcattgactccatgatcgtcacccaacccgtcaaagacctcgcccgcacctggaccgtggccaaatttgacccaggcgtcctggacatgccccccctgctcaacaaactgaccaccaacaacaccttcgaaaaacaatatcccggcggcaccctcttcgtgaaatgggccaactcctccagccaactccgccagatcaccgcctgctacgcatttttggatgaaatcgacgaatacccccgcaacctcaacaaccaaggcacagccgaccaacagatcgccgcccgcatcatgtcccacggcgaacgcggcaaaatctaccgcgcctgcacccccaccgttgccggtggcagcgcgattgaagcaagctttcttgacggcgaccaacgccactaccacatccactgcccccattgcggcagcgaacaaatcctagacctggaacacctccagccagatggcacctttgcctgcgccgtcaacggctgcatcatccaagaacaccacaaaaacaccatcctcaaagaacgcggcaccggcggcaccgcgttttggcacccccacaacccctcggcccctcccgaccatcgcagctactacctctgggccgcctacgcccccctgggcctgggcctgagctggaaacagattgcagacaaatgggccgaagccaaacgcgacccctccaaactgcctggcttcaccaacctgattctgggcttgcccttccaaggcgaacgcgacgcccgcaacgctcacgaagtggccaccctcgccgaacctggcgtctatcgtggcttggtgccccggggcggcctcgtccttgcggcaggcgtggaccttgcccatgaccgcgctgaagtccacctcatcgccactgggcgcggccaacgccgctacatcgttgactacgccgtcatcgacctggaccccaccgtcctggagagctacgccgacttggacgcctacctccgcggcacctggaaaaccgcctctggcatcgacatgcccattagcgccgtcgccattgacggcggcaactggaccgaaaccgtcgcccaattcgtcaaacaacacgttggctggtccggccaatcccgcatcctggacaccccccaaggcttcctgaaacagaccctctacctcgtgcgtggccgcgccgaagtcaaatcagaccgcgccgtctaccgcccctcaaaaaccaccgtggacgaacgcggcaaaacactcgcccgagacgttggcgtctggggcgtcggcaccagcgtcctcaaacacatgatctacggctggctgggtgcggccctgaccgccaaagacaacgccgcccaaacaggcaccgtcgaagacctcagcgcccgcatgctgcgctttccaggcggacgtggcgacgacatccctgaccccttgcaccctgatcctggcgcactgccagaacactacttcgccggcctcaccgccgaatacttcgacaaagacgccggacgctggattaaaccccgcggcgtgcgcaacgaacccctggataccgccgtctacgccctctgggccaccctggccccggcactcaaagtcgacgtcatgcgcgaatcacagtggcaagccctcgaagccctttaccaaccgaccaacggcagcctctttgacccacctgtcgccccgcccactgacaccgcccgccgcaccctgcgccccgtgaccgccccccccacaccgcccagcgccccccatgacatgccaccgctgcccaacagcggctttggctctgaccgttggagcaagcgtctatgaaccgcacgacgcaccgcaccaaagcccccatcccctggcgtgccgaagcgcttccaaaccaacatcagagagacacatgagccttgctaccgaccaagttgcactcctaaaagacgcctaccgcaaagtgccgttgggcggcctcgtcctgacggcgggcgtggacctccaacatgatcgcgccgaagtccacctcatcgccactgggcgcggccaacgccgctacgtcgtcgactacatcacctggcttgccgaagcgcttccgaaccaacaccagagacacacatgagccttgctaccgaccaagttgcactcctaaaagacgcctaccgcaaagtgctgctgggccaatccgtccggtatggcgagcgccaagtgacgcgcgccgatgccaaatggatcagcgatgaactggacaaatggctgcgtcgcgccgccgcagaagccgccccctccacgggcggccacgttcgcattgccattgccgacttccgcagagacagcggcggagatgccccatgaccaccgcatccccgcgcctgcatcgcctggtggctgccttcgaccgcagcctcctccagcttgccccagcctgggctgcctcccgtgcccagagccgcgtcaaagccgttgcctaccgacaggcctatgaagccgccgaaaaaacccacctgcgccaagcctcgcgcgactttggcagcggcaacaccatcgtcaccatgaccggagcggccctgcgcaaccaagcgcgccacctggaccgcaaccacgacatcatcagcggcggcctatccaccttagtccagaacatcatcggccccagcggcatcaacatcgttccgaccccccgcgacgtcgacggcaacctggttgaatcactggtcgatgccatcctccccctctaccacgcctggtccaagcgccccgaagtcacctggatgcacgactggcccagcgtccagcgcctgctggcccgcacctggctgcgtgatggtgaagccttcgtccaagaactccgcggcttcctgcccacattgcaacacggctccggcgtcccgttctccatcgaaatgctcgaaccggatttagtgcccctggattacgacgacccctcccaacacatcctccaaggcatccagcgcaacgcctggggccgcgccaccggctactacatctacacacaacaccctggcgacccagaggtcctgctgcctgaaaaaaagctggttccctcccacctgatccgccacatccgcaccatcgaccgcatcggccaagtccgtggcatcagcctgctggcttccaccttcacccgcattgaagacctcaaagactacgaagaatccgaacgcatcgccgcaaaaattgccgcctgcatggccgccgtcatcatcaaaggcgagccgtcccagtacgaccccgacaaataccccagcacaggccaacgcatgatgcgcttccagcccgcgatgatatttgacggcctgaacccaggcgagaggatagaccccatcgacagcacacggcccaaccccaaccttgagtcctaccgcgacggccaattgcgcgccatcgccgccccgatgcgcatctccttctcctccctggcgaagaactacaacggcacctacagcgcccaacgccaagaactggtcgaacagtacggcgcctatggcgtgctggcccacgaattcatttcccagatggtgcggcctctttacgaacgcctgatcgccatcgccgtcacctctggcgccctgaccctgccgccgaacgtccccctcgccaacgccctgggtgccgactacctgccgccctccatgccctggatcgatccactcaaagaaatcaacgcactcaccgcccaagtccaagccggcgtgcgctccttgagtagcgtcattgccgaacggggtggccgcatgtacgacaccgtggaacaactgtctattgacaagcagtgggctgccgaacgcggcttaaccctcagcgtcttccccaatgccaccgcatcgccccctcccgcgaccacagacgtcgacgagggcgacgtcccccaagaccaggcagcaaccacatgacctccaccacccacccgacgcaccgcctcaccgaccccctggaccccatgaccccagcgcccatgcccccccaggcccgccccccatcggtcgtcgcactgcatgccagcaatccaaaacaagccgaactcctcctctacggccccatcggcgacctcttttgggaggacggcgtgaccgcggccagtgtcatcgcccaactctccaccgtcaccgcccccctcattcacgtgcgcatcaactccaatggcggcgtggtgagcgatggcctggccatctacaacgcactcactgcccatccggccaccatccacgtcaccattgatggcgtcgccgcctccatcgccagcctcattgcccaggccggcaccacccgccgcgtctatcccaactcgctcatgatgattcatggcccccaaactggcggctggggctttgccgaagacttgcgggataccgccgccatgctcgacaccatggccgctgccatgcacaccgcctacaccagcggcgccacccaccccgaagccatccgtcgcatgctgagcgacggccacgaccactggttgactgcccaagacatgatcgccgtcggcctggccgacaccatcatcgaccttgccccacagcacaccccagcggccacacccgacgccaccgccaccgccgccgcactgctgtcctacctccaggccatcgccacccacccccaagacgccatcactgccgccttgcgccaccacatccaggcgaccgtcaccccttctgcctttgcctgcctgtgcagcccccagcaacacgctctcatcactcacattgaggaccccaccatgaaacaccacttgaacgtcatccttgcccaggccggcaccacgccaccgccgtctctcaccccccctgccttaagcccccagacgggccacaccccctctccatcacagggcaacacacccccgcaatccccagccccgggcagcgcggccaacgacgacccactcaccgccctggaggcacgcaacgcccgcatccgcgacgtcttcgccgccttcgcggatgtcccaggcgtccatgacctggaagccagctgcctggctaatccacgcctgagcgtcgaacacgcccaggcccaactcttgcaacgcctgcccgggggggctgggccattggccgccacaccgcgccacggcattcaccatctccaccttgtccatgacgaacacaccacccgccgccaacgtgttgctgacggcatcctcgcccgtgctggcatcctgactggccctgaagcagacgccgcccgtcaagacaaccctgccgcacacgaagcgctctgggtccttgccgaacaatcactgaaagccacgggcgtcgacacccgcggcctggatcgggagaaagtttcaaaaacggcactcgcccaaagcaccggcgacttccccgtgattctggagaacgtcatgcacaaaatgctgctgactgcctaccgcctccagtcctacacctggatgcgcttctgtgccaccggatccctctccgactaccgcccccaccaccgctaccacatgggcggcttctccgacctgaaaaaagttaacgaaaacggcgaatatgaaaacggcgtcctctccgatgccgaaaaagaaaccatccaagccgtccgtaaaggccgcatcctccagatcaccccagaagtcctggtcaatgatgacctgggcgccttctcacgacccaccagccgccttgcccaagccgccgcccgcaccattgaaaaagacgtctacgcactgctggcattgaacgcgggcagcggccccagaatgagcgacggcaaacccctgttccatgccgaccatcgcaacatccccgtcgccgccgccctctccgtcgaaagcattgatgccgcacggcaactcatggcccagcaaatggacgtgggcggtaatgacttcctggacattgtccccgccctctggcttggccccctctccctgggcagcaaagcacgcgaactcaatgcccaggaatacaacgacgaggccggcaaacagcagcgtaaacccaacgtggtgcgtggcctgtttagcgacgttgttgattccccgcgcctcaaagaaaacgcctggtacaccttcgccgatcccaccctggaaccggtcattgaagtcgcgtttctcaacggcgtccacaccccgaccctggaacaagacaccaacttccggaccgacggcctgagctggaaagtcgtccaccgctacggcgttgctgccgtcggctggagaggagccacgcgcaccagtggcacctgattcccctagcactgcaacgggctgcctcccagccccttccattgactgaacgactgcattgaggaccccaccatggcgaataacttcatcaaacctggaaaacacctgacctacaccccacccacggccattaaatctggcagcgtcgtgctgttcggcgaagaactgtgtgtggcgctgaacaccaccaatgccggtgacagcggtgaacttgctcatgaaggcatttttgaattacccaaagctaagggcacggggatccgcgaggggacccgaccggcgtggagcgtcagcacccatgaagcattgaccggcggctcccctgaaaaaggcgacctcatcaacagctgccttgcggttgaaaccgccctggcggcggcggtgaaagtcaaagtcaaattactcccaggctgtggccgctggcagacctgatgtgtttggaatcccacactgcagtcaaggcagtgtggggatgttgagtcagtgacggaaaaaccgcagccatgtttaggaatcagcccattaatcacaaaatcgctagcgcccttggtctggccaccgtgaactcgacggtgtcggcgagtatggccgtgctcaccgaatcgaccctcattgagtggatctccggcgtctacatcgtcttgcaagtggcttacctgctgtggaaatggcgggtggactggaagcatcaaaagatgaaacggcaacggagcactgaccatgcctagaacgcgtccatcactgcgccacattgctcccttggttgaaaagggtctcaaaggcgcaacgctcgtcttagcgattgccacgcccttcgtcgcgtactgggagggcttaaaacatcgtccctacaaagacatcgtcggcgtgtggaccgtgtgctacggccatacgggcgctaatgtcgtcatcggcaaaacctacaccgaggccgagtgcgatgccctgctccaagccgacctgcgtgaagccaatggctatgtgcggcgctgcatcagcgtccccatgctgccccacatcgaagcctccctcgtctccgccaccttcaacctcggccccaaagttgtctgtggcagcaccctacaacgcaaagccttagccaatgactggcccggtgcctgcgccgaactggaccgctggaaacatgccggaggccgcgaagtgcgtggcctggtattgcgccgtgccgatgaacgcgccttgtgcgaaggcagggcctcgtgatgctcattctccccttcctgctcatcgttgcattactgctgtggatcagcaccggcctgggcgcgttcttttacgggaaacgcctaggcatccaaacccagattgcacaacaaaacaccgcactgcaacaggccatgcaacaacacgacaccatccacaccaccgttgccgccgccggcacccacgccatcaccagcgttgccacagcagtcactcacaacaggattgccaccgatgaaagcgccagacatatccgcattattcgcgtccctactgattgcagcgtcattgccgatgacatcgtgcacgagcttaggctcgcccgtgacactgccaatagcgccctcagaagcggcctgcgaccagctccccccgctgccagtgccgccgattccaaatgaacaaccagagatcttcgccgtctttcgcagagtgatcggcttgtacattgacgaaatcaacaaatacaacgcccaggccatgtgccgtgcccaggtgcgcgcggcccatcagggggtgcgatgactgacctgctgaagatcactgtggatgcggacgccatgctgggccgtcgctttaccgcgctggagtctcagcacctgccgtttgccatcgtgcaagcctgcaacaccaccgccttccagatccgtgacacctggaaacgcaccgccttgcgcatctttgatcggcccacccccttaaccatccatgccgccctctacaaaaaagcgaccaaacaaacgctgtgggccgagattttcctacgcgatgaagccttcaaagggacacccccagccacctacttactgccccaggtcgaagggggcacgcgtcgcctgaaagcgatggaacgcttattgatgtccatgcagatcatgccgcgccacatgtttgccgtccctggcgatggcgcgccccgggaccgctacggcaacgtcaacgtgggccaggtgcggcagatcctctcccagctgcgtgctggcctagagacgggatacatctccaacgaaacctccgagcgcaaagcacgccgtctgaaacgccaacgccagcggggcggcggcggcagctactttgtcgtcaaagaacaacgcgggcgcctgcgccccgggatttacgaacgtgtcaccttcggcagcggcagcgccgcccgcagcatgtttattttcaccacttacgtgcactacaccccgcgctacaacatcttcggcttggcccaaaaagagtgggacaggttgatgccgttttacttcaaccgcgaactgcaaaaagccatcgacacttccatataccgagggcaggcatgagcgaagcgacctttaaacacgcggttgacgccgcatttttcgaggcctgggccgatgttgtgggcggcattgatgccacctacacctccccccgcggcgtcatcaccccagtgcaggtgctggtggatcaaggcgttctccaatttggtgatgacctgatgccggtctctgcatacagcaccttcattacctttcgccgtgaccagatcgaaccggaacccaacgccaccctcaccctggcccagaccacctacaccctggcgcagcgcgtggacagcagcgacgcatcactcagcaagtgggcggtgcgcccatgaacagcccgcgcgccaccttactctccagcgttgaggccgtgctcacacagatcaccaccgccgcaggctacctcaccgatgtcggtcgcaccttcacccgggagccagcgccggtgctgggtgaaacaacagacgcctgcatcaccgtgatctggactagacaggaacgcgccaccattgcggccctgacccacacccaccgcctgaccaccttccaagtgatcgccaaagtgcccgtcagtttcagtgatgcacaagcgcggctggatgccatcacgaccgacatcgaaaccgccatgaacgccaagcaggcccagtttcctgtcggctttcattgccctcagtaccagaccgcagagccactcatccccccgcagcacaccgttggctggatcggcgtctgtctcacctatatcagccacatccctatccatcacccagcaccatcatcaacagagcaccagccatgacacacaccgactacagctacgtaggcagcggccaagtcctcatcaaggaacacggcgccgccgccccttttctgcctattggcaactgttccaaactggaattctcgccgcaggtcaataccctgcagcttcaggatttcaccaacccagggggcggcatccgcaaccgcattgaccgcgtcaacgacgtacagttcaccctgaccttccacgacttcagcgccgaaaatttcgcccgcttcctgcgtggtgcctccacagtgacggatctgggcaccgttgccgccgaacccgtggtgggctatgccggaggctggacaccgctggcgaaaatcgccgcgaccatcaccgcggtcaaaccctctgggggcggtaccccctacaccgcaggcgaggattacctcctggaacacggcggcctcaccatccctttagagagcgcgattcccatcccagagcctggggcgccgaacatccaggtggattacacctttgccagacacaccgtcaccgaagcattcgtgcatgccgcccagcaatacaccctggtattcaccggcatgaacgaagcacgcagcggcaagccggtgcgtgtcatcgcccacaaaatcagcggcggcgtcctgtccacactcgggctgctgggggaggactacggggccggtgacgtttccggctcgctcttggccgataccacccaagcctccggcctgtcgaaattctttcaagtggtggtggtggcatgatgacgcccgacacactggacctgctggacccaccgacgcatctggtgccgtttcgtggtgagtcgctgcacatccggccactcaccattggtcaactgccacagttcgtccggctcacccgtccgctgcttgatgccttgctggacgtccccctggacaccttgccacaggcggatgccgcactgcttgatgccttgctcaccctcattgccgagcatggtgacgccgtcattgccgccgcggcgttgctgacggataagccgatcgaatggatccaggcaggggatccggcggagttcatcaccctggttcaagcgatctttgcggtgaaccgtgatttttttacccaccggctcacagcccaacggggcacgcccgtcccgttggccaatgggactgggccgataccgtccaacacctcattgagcacggccactcaatgaccgagatcaaaggctacaccctggcacagctacgggccttcagccacgccgcagggcgcgctgccgtacgtcggcagcgcgatgccgccatcaccctacgtgcggcgcaatacgctcagagcgactttgagcgctacatcaacgcgatggagaaggatctctaaatggccagcagtcgcggcgctaacttacgggtacgcatctcagcggatttggccgacatcaaacagggcctgggcctgctgcgcggcgaactcgctaaagtcaaagaggccgcctctcgcgcggcaccgcagaccgccagctggaccaagggcattgattcggtacggcaggccctgggcaaccttgccggtgcctacatcggcgtgcagaccatcaccacagcgatccgcggcgtgttcactgcgctgggtcagatggatcgcatggacaagtttgtgcaaatgtctggcgtgagcgccgagaacatcagcaaactggcctatgcggccaaatccagctccgttgacgtggaaacccttgccaagggcattggccggctcaataaggacatcatcagcggcgacagcatcatccacaaactgggcatctccctgaaagatgccgctggcaacacccgcgacgtcagccacgtgttcggcgatctggccgatgtgtttgcacagcttcctgatggcgccgaaaaagccgccttggccgccaagctattcggcaaccgcatggggccagggctgatccccgtcctgaacctgggcaaggaaggtttgaaggaatttggcgaccaggctgaagccaccggcaatgtcatgagtacgcacgccgcccaggccgccagccacttcagcgaccaactgggactcctcaagtcccaggcgaccggcatgttcaacatcgccgcccagcagctgcttcccgtgctgaccaccatcgttaaaacactcaatgactccggggaagcagcccacagcgccgccaccgggggcagggcgctggccgcggcatttaaggtcgtcgttgccgccggcatcatcgtcaaaaatgtcattgaaggcatcgtcaacgttctggccttcctggggaccaccgcgttcaacgtcggcaagttcatcacccagtccctggtgggttccttccgtttgctgggggatgcggtcaaaggactcgtatcgggccgcaaccccctggatgttttcaatgcgtatctgagcggtgcggcgcagcgtgccagacaaagtcaagccgacttagctgacatgaaaaacggcatcgtcggcggcttcgctgcggcaaaacagggcgtctttgaatctgcgcgcgacattctcaatggcgtgtccgcactttttagcagtatagacaacgagaccaagggcgtggagcagtcggccaaccgtgccagtaccgccacccagggtctattagataaagtcaggcgcttgcttgctggagaggggggcaacaccgcccataaaaacgataccagggaccagctcgccgccatcgctgcggcggcatcgctggtgcaagatgaagtcaagcgcgccatcaccgcgctcgaccagcagttttcagacatcaaagacgccgacaagagcgccgctgcgatcactgcctactatgaaaaacggatcaccttgcagcaacggctgatcgacctgcagatccagcaagcccgtgccgaattagccctggccacagaatcgggtaagcgcctgcagattgaagcaaaaatcgccatcctggaacgtgaccgcgcccaggtcgccattgacatgggcaggcagcgcttcaaagcgcaggaagcgctgaatcaaaagatcgccgacagcttcggtcaccggctttcgggcatcaccagccacctggccgcccatgaaaactccatcagcgcccaggttaatgctggcatgctgggcatggcagaaggggagcgccagctcaacaccctgcgcacccaggcccttgaaacgctgcgcgccctgcgcacggaccagcagcgctatctggacagcatgaaggccgacggcaaggacgtcactgatgccgtgcagggcttggcacagattgaccaagccatcgccgaagtcaccgcccgccaacaggtgtggcgcagccacctggaagacatcggcagcggcgccctgggcggcttcttcaacgacctgattgagggtgccaaatcctttaaagacgcctttactgacatggtgcgcagcttcctgcagggcgttgcgcagatgatggcgcgggagctggcactcaaggccatcagcaacatcatggcctcccttggtgggggttcccgtatcggcgcattgctcggtgcaaaggtcgctttagcccacggcggcggcagggcgggtgcgttacgcctgcaccgtaacaccattaatccactgctgtttggcacggcgccgcgctaccacagcggcggtgtggctggcctgcagcatgacgagatccccgccatcttgaagcgcggtgagatcgtgcgtaccaaacagcaggaggcggccctgcaaacacgcctcaacgcagggcagagcgctcctggccccatccataacattattgtcttcggtgaggacgaactggcgaatgccatggccggggcggcgggtgaaaaagtgatcgtctcccacgtgcggcgcaacaggggggctattcatggctgatcctgtcgcctggaccttcgcccctgggggggaatacaccgaaacattcgaatggctcaccgacgtgctccaggcaccgaccggcggcacgcagcaccgtcgtctgcgacagtcaccgcgggccacactgcgcttctcggcactggaatcaggggcctcccgccgctggatggacgtgctattgcgtgcccatagcgccgcgcggtggtgggtgccgattgcgatcgatgcacgcgccttggccgtgacggcggtggcgggcgcgacaacgttggttgtcgcggtgcagggcgctcgcttcaccgtgggcggtcatgtgctgatcgtcggccccgatccgcgccactatgaggtgcatcgcatcacggccctgggtgaacagacgctcaccctggcaacggggctatccttctcctggggcgtgggcaccacgttgtatcccgtgcggctgggccggttatccgagcctccccaggtgggccgctttaccgccgatgattcggccttggtgtccttacagttccgcctggaagaccccttagacagtagtgcagcgatccccggcaccacctaccgtggctaccccgtgttcgataccttgccccctgtctggacgtctgatccggtgtgggtgccacagcggcacatccacgtgcaggacgacaccatctccaccccttggatgacggacaccgcaggcgtggcgctgggcaccaccaccatgcaatacgcaccggatgagactgccgccatcctcacgttccgcagcatcctgtttgccctggccggacgctgggcgccgctgtgggtgcctagctggatccacgacctctcattggccgccgatgtgcgtgccggacaacgcacgatcgatatcgtcggcccgctgctgtccacccccagtggcgcactccaggccaaccgtcgcgacatccgtatcgcgctgtacaccggtgcggtgtggtatcgccggatcactgccgtcacatcacgtgggagccgcatagagcgcctgaccctggacagccggctgcccgttgcattcaccctcacccaagtgaagatgatcagctttatcaccttcagcgtgcaggacgcagacactgcggtattgcgctatttcggtccggaggtggcgcagtgccagatcgtgtggagggagctgcatcatgagctttagtgcttttgagttgggtcgcttcaccggacgtccagtgcgcctgttcgtcttcacccgccagcacctgacttggcgctttgccaacagcgaccgcgacatcgtcagcggcggtttcacctacctggccgcacgcatagaccgtagcgacatccaacacaccaccgagcgcgagaaagatcagatcaccatcaccttcccgtatctgctgaaccctgctgccgatccgcttccagtgacccaggcattagggaatcaatggcgtccgtatcatccggtggatgtcatccgtgtcgtctgcatggtgatgcatgttggcgatacggatccgccgcaggtggagtgggtgggtcgggtgattcagcccaggttgagcgatactgaaatggaactcacctgcgcaccccacagcagcattgcgttggcacgtaatcagggcgcaaagtttcagaccagctgctggaagaccgtctattccaccggattgcgtggctgtaacctcagccctggtgcgcatcgcgtcacgggtcgcgttgccagactcgaacaactccccaccgatccgccgcagggcgcacacgttctggtccctgacatggccgctcacctggcgccgctggccggtcaagtcgctacgtggacgtatgaggcgcaggtgccgcactctggaaccgtcgcttctgttcttaaattccatgtcaggctcaacaacgtcaccgccattgccgtggggaccgtgctgcactggaccgccgccgatggtattgcacaccacggcaccgtgacgggactctttggcaccgtagcggtgctcaacacgaccgaagggatcaccgctggtagcgtgtgccactggagcgtggccgaagcgcggcaaggcacggccaccatcctgcaggcttatcacgcctatgactgggtgtcacaggctgccggtggttcctcctccggcttcagttgggacgacgccagcggcctgcacgatgcacacagtggaaccgcctggtcagtcacctacaccagacgttcggcgttggtactcagtgatgtcaccggcttggaggagggcagcagcatcaccgtggcgctctccggcagtggagtgagcggcacactctctgccgttgctggcttgcagctcactgcggcgcactttgccagcgcggcgtattccctggaaggcggcaccctgacctatacggacgccaacggtctgctgatccgccgcagcatcgcctcacacaccctgggcagcaccacgctgaccctgagtgctggtggccccaaccccgtcgtgaatgatgccgttacggtgctcccaacgtgcccgcgcacctgggatgcctgtgcagcgcggggcaataccattcacttcggcggtgcggtctatcgtccgctccacacgcccgacggggtatccatgtcatggggctgatcgcacgcctgcgccgctggtatcacctctggagatggcgcctgcgctactggtggtacgacacaccatcgggcgtctgcgcccagcactgggcgctgggcctgggcgtgctggtgctgatggtgcagctggtgcgcgtgtgcgtggccgcggcgttgcctgcaccgcgtggcgcgcccgcacaggccgtctactggtgggtgtggcaactggcgattgcggtcgtggcggcttacgtgtcggcggcgttgcgccccaaaccggagccggtcaaaccacagcaggcgcaggtgcccaccgttcaagacggccaagcggtgaaacatcactttggcaccgtctgggtcggggatgaattcattctggcctggaagatgcaggggacgattcccatcaaaacaaagggtgggaagaaatgagcggactcaccgtgaccaccaagcatctgttcacgatccctcatttcagccgccgtgctggtttttgccgcggtggggcgcgtcagttcttcatggatcacggcttggattggagtgactttgtacgcaacggcatcgctgccgaggcgttgtctgcaaccaaggatgcactggcgaacgcactggtggcgtgggcgcagcagtgcgagcaggggcgcgacgatgggcggtaaatcgaaaaaggccaccgtcggctactggtatttgccgatgttccatcacgggcttggtgttggcccgttggatgccttcctggaatttcgtggtggggagcgtgctgcctggtcgggggagctcacggacaccggcacgattcatgtggatgcgccccacctgttcggtggagagaaagatcaaggcgggattgtgggtgatatggacgtgctgttcggcaaggccgaccagatgcctcacagttatctgcttgccacgctcggcccccaggtgcccgcgtggcgcggcattgccacggtggtgtggaagggcggcaagtacggggcgatgaatccgtatccacagccggccagttacaagattcgcagaatcctcaagggctgggatcatgatgcctgctggtatccagaaaaagccgcgatcgggatgcagatggccccctgtgtggcggtgtattttgccatcgacttgtccggctccatggactatgtcggcggtaatggccggtcgcggctggagaatatgaaaaccgcgctcaacgcggtgcttgatcagctggggcaaaccatcgccagcggcgcggcggtggacatcctgttggtcgggttcggtgatgccccggatcatcgccaaacactcctacggcgcaactgcactgcacagggcattgctgaactgaaatcatgggtgagcgcacgccaggcgctgtatggcacttatttccccgccggtacgatggacatgcccagcttttacgccgcggcaccacccaatgcggtccgcgtggcattttttgtgaccgatggcgtgccggacccgccatcagccaccaacgcccaggccgcgcgtgctgatgtggatcaggtggcacacctgcggtgctacggcatcactatcgatctggccgacaccacgtataccgacatggtccacaacgtccctgggacgacgtcggcagtggtgcggggcggcgatacggccatcatgacaggcctcatccgcgcggcgatcttcacgggcttattggcgatgaacgtcgcgcacgttctctactatgccaacactaacgctgagatgggccgcgagccgttggatgggatcgacgcggccagcttccgcgcagcggctgactggtaccacagtgagggatttggcatctgtacctgctttgatccagcggccgaatcagccgatgcctttagcacccgcattcaacggctcggcggctgtagcgtgtcgcgcgatcgcacggacggcaaactgcacctggacattgctaacggcctctatacgctggaggcgctgccgattctcaccgacgatgcgatcctggaatggagggaacatccctcggtgtttgacaatgcggtcaatagcgtgtctgtcacgtattttgaccccgagcagaaaaccgacatcaccacaccgccggtgcaggatctggcgttggtacagacctatggtgtcattcaccagacgattgactctccggaaattccaaccgcatcactggcgctgcgcatcgccgcccgggaactgcgtgccagcaccaccccactgcgtaccttcgcgctgaaaaccacacgtgccgcctatgcgctgcggctgaatcagtatgtgcgtttgcagtgtcccaaacgtggcattgctgacatggtgtgcattgtcggcagcacccaaagcggctcgctgaaaagcggtgccatcacgctgctgttgacgcaggatatttaccgcttgccggtgtcttccagtgtggagatggcggccagtcgtggggccgtgcctgcgcaaccgccgctgtcgatcacctcacagcacgtctttgaagcgccctacattgagttggtgcgttcgctgccgagtcgcgatctgagcgccttatcggcggacgccagttatttgctcgctgtcgcacaagatccggccactagccgcaattacacgctgcacgttgaccctggcaccggtgagtatcaggtggcgggtgatggccagtggtgcccctgcgcacggatcgttgccggtgatgtcacccgcactgcgaccgaatttagcctcaccgatccgtatcggctcgaccaggtggccattggcagcgccgcactgtgggggagcgaaatcgtgcgcgtggatcgcatcacgcctgtcggtcgcgagctgcgcatcaccctggggcgcggctgtggtgacacggttgctgcaatccatgcagccggtgagcgcatctggttctacgaagacaacgccgcgaccgatctcaccgagtatgtcaacggcgaaacggtcaacgtggcattactgaccaataccggcagtgcgcagctgtcgctagccgatgctgccgcgctccccctgacatttgtaggacgcgccgtgcggccttatccccctgggaaggtgaccattgccgccgcgcagtggcctgaggcggtgtctggggagttcgtggtgacgtgggcacatcgggcgcgcctcacccaagccgaccaattggttgacgaccgcatgggcagtgtcaccttgccccgcaaccaacgctacgggctgcgcttcacagacagcagcggggcgctgctggtcgagaacaccagaatgggtgccgacagcgccaccgtctcactcaacaccaccggccaggtgacgctggagctatggaccatcgacaacagcggcacgagcctgcacacgcatcgccatgtctttgtgtacacaccgaccgatccgccgccgcaggacagtacgatcagtgctgccgaggcattgccggtgtttgagggcgttattgtggatggaggcaatctggatggctgacaccctgcaataccgctttgtggtgcgtcgcgggcgtgcggcgacatggaggctgcgtaatgagcggctgctcggcggcgaattcggtttagaaaccgacacgggacaattgaagatcggtgatggcctcaccgcctggaatgatctgccttatatgaaggcgggcacgccgctggggacggccaatgccggtcgcggcgtcacgattgatgtgagtaacccagacgtgccggtgctgagtgtcccggtgtacgagggcggggccgggatcgatatcaccaacggcctgatcaccaatacacgcgctggcattgtgctcgccggtgtggtggccgattacgcgcttctacctcattcgctcaccgcgggcgcggcctatctggtcagcgaggacgggctgatttacgtgtacgacggcagcgcctggcccgctgagggggacgggatcgccctccgaggcggtgggggtggcaacgatgactacttttttggagggggactctaacgcatggccaaatccagtaaacaatcctttgtgcaaagcgtcggtaactttgcggcgcagatcagtcacgccaccggtgcaggaggcaaggtcacgctgtttaccgtcggcagtgaacgcggcgatgacgaagaattgcgtgccttgcaaattagtaacaccgacgctgccgctatcgtggtgaatttctatgtgcagatcgccggtacccacgtagacgttctagtgggcagcgtcagtgccgccgcgggcaccacgaccgattgccgcaatacggtggcgttagccggattattccagcatgacgtcaacggcaaccgtgtgcattacatgcagaaaaaccatacctggaaagtcgccgcagtgactgcaccggcgctggggagcacgttggatatcttcggggtgacggggaagttctgatgatccggcccccggtgtcccttcgagcattgacagcacctcacctcactgaggcggtgcctggggggtgttgcggtgttgggtgatttcaatacacgcgtgcgacgagtcaagcgcatccctgcaacactgacaaaatggaccggcttcgtccctgcagtggccacgcaggtcacgcaaaccgcgccgcccgtccttgctgatggtgatgtggtgctggcctttgtgatgcatcgcgctgcgctgacggtcattccgtccggctttacgctggtggctgtggcgtctggcccaacaagctacgcggggcagtactacgatcactgcttatcgatctaccaacagcgcgcctttaaacgtgatgctgggcaggtgcatctctgggggcagcgcgataatgcgcgcctcattgttggctatcacagttatacagggtcacccccattacggatcaccggcgcgctgccatcgtggacgcatgagggggggctccaagtgcaggtgccgtctcttggtgcgctggccgccatcagtgatgtggtgctcgccgcggcgacgctgaacatcactacctcgtcaatcatcacggcgcaggtgtcggctggttgggagattcaatcgctggccaccacggacaatctgcgcttgctcgttgccgccgccgtccccgtcagtccagacacggcatcgcccgtgctggatctatggccgggggaaaggatgtctggaaatttcaacgccagcattgcgttgggggtggcgtcacggtgatcacgctcttaacccacatcagtaatgcacagcggtttggcaatgttgtcggcttggcgttattggcgccgtgtgttgtgcgtgccatcggcatcaccagcgcggtgctgttggccgctgttgcgggtgaggtggccaacacggcggcggcggggctgatctgtcggccagtgatgatcggtgccagttggtgttattcctccacgaccaggctgctgatgtcggtatcacgctgctgcttgcgctgatcgctcatctgttcggcgccgttttaggcgctgcgttgggaggtgtgctgcgggcggtgaactagcggcgtgggctaataaatatatttgcaatggagttcaataaattctcctgagaaatgaattagagtggaaacgtgaaattaaattattatttaaatagtaagatttatttcatttaatctcaattaaaatttaaggaaaagaaaatgcgaataataaaattaaataagttatctttaggtctattaggaattttcagtatgacgttagttccttcccttagtatagctaaatctcaagaggaccaagttccatttaaaaacagaatgactggcagccatgtcttatcagaagatgatgttggatcaggcattaatttctctgatcaagaagcagaagaagctcggcgctattggactccagaaagaattgcttcggcaataccattagattcagaacaagattcgagcgttgaaaagagcgctaaagagtattttagagaaaataaaattaacaatcaaggaagctatgaggcggtttactggataggccggatatattttgatgctggcggtcgccaatactcttgtacaggcgcgtcaattgaatccaattcaaaaagcatcgtcgcaaccgctgcacattgcctctatgaaaaaggagaatggtcaactcgtgtagtttttatacctgcatgggatggtgtgaataaacctttattaacttggggagctatctattatcaagtcccacgtgtatggagatatgaagaagaccgtggacatgatgcagctttcattaagtttaggccacttaatgattggtacggcaagaaagagtatcttgctgataaggcgggagctcaaacgcctagcttttcattagggaagtcagggctacattatcaagcatttggctataaaaacttaagtggatttaacaatactccacttttcacttgtcaaggtgaaggcaggcatttttggggaatatcgaaatatccagagctagagatacctggttgtactgttcctgggggatcttctggtggacccgtgtatcacgcatctgaaaaaggacctaacggaactcaggtcggagtgatcacagaacagagaaaggcaaaagatgggactcccttgctaattttcgttccttgggggagcattgagtataatctctataaaacggttgatgattttgggagataataaaatgtcctttgcaaaaacatagatttggaatctctgcatttctgaggatatcttaagcgcaacatgcgcttaagatccctgtactccgagatccacgtgctgtttgaaggcatgaacattatccccctgcaacggcgatactcaatttcgcgcacctaaggagaacaacacaccctcaggcgagctggtgatcaagagttgggccgatacacaggcgcagcttctgtaaggctgcgggcatccgcagatcagatgtcaaatgtcttagatgctattgcggcattttctgatagcctcatccctgctccatacggcatcttaatcctgccggacgcggggccattatggccgctcaacccacgtggcgctggggcagcgcctttgcagacggcttagagcaactcactcatgcgtcatgcgatgacttataacgcatctgttttgtgtgcttccacgtaggagcgcagtactgcattgatgcgcgtctgatagcgcttaccagtgtttctgaaaaaatccaatacgtccgcatcaatgcggagcgtaatttgccgttttgcatccggcaattcagttggtttaacccattcggcgtccggcaggcagggcgcgtcactatagtcgatgcgttcatcttgcatcgttgctatagcatttagccgtgccttttgctcgtcggtaatgactggtctcgatttcatatcaagggtttgcttcatggtattgctttcgttcgcttgcattagctttcctcgcagaaatcaggcgtatgattctttcgtcacgaaccgtgtaaaccgcgtacaggagcgctgagtaggcccgcccgattgttgcccaacggtcttcactgtagttctcccgctcatcgtaggtctcgattcgtccttggtcatagaaaataagcgcggcatcctcgaaagagacgccatgcttttgcaagtttaatgctgccttgtcggtatcccattcaagttccatttgcggcattacacatcgtaactccttttgtagctacaaagattaagacttatctgcggatcagatgtcaaatgtcttagatgctattgcggcattttctgataccagcggcgctgcttcatgcggcatcttaatccttgccggacgcggggccatgatggccgctcaacccgcgaggcgctagagcagcgccttttccggcagcttagtcgctttgattaacgggatatttttgtacagattttttacagaaatctcgttaaccaaaattcttatattgtattgcttgaatcaaaagtctaattgcgattcatggatacctaaagcaagtgcaattttctccctgcttgatttacgaatgcttttcttggcttcaagctgagcgtatgccccttgggtgattcccatgcgctgagcgacctctatttgagtcagttgcttatgctctcgccatgcgcgggcagcagaccatgtattgtccatcgccaagtccaccacagcagcagggatcccaggttttaccttgaattcccccttgacaagggcttggtaatcgctgaaagggatcaccgcaaaggcgggatggcctccagcatcgcggaggatttgcacagattcaataagttcgctcatcacgttttttcacctcttcaatcgcaacgatgcgagccgtaacgtcaaaatcaaatagcactctgaagttgcctactctcaatcggtattggtgcttatgattgatgagtaccttaacgttaatgcaatcgggcatgttggttagtttgttgcactcgctacggactcttttgctgtccaaaggttgcaactttcgtaattgcttagcggctttcctggagtagataacctcgctcacgaggctaattatacgttatttattagattatttgtataaatctaataaaaattaactttatctctaatccagggtctccctgttggcttgttgctaatcttctgttcatcgacacgggacacttcaagattgagcgttggaacatcttgtgagtggctgcaatctcaccttaaatatgtcgggaaaactccaaaaaatgcctagcaatgacaggtgtttcacgtgggggcgtcgggaaaataattctttagaatcctttctgcatcaaggtaactgtaagtaactgttaatcagggggtcgttggttcgagtccaacttcgggcgccataaatttatttaaatataagggcttatatctgtataagcccttttttattttgattgtttttctaataaataaacgtgaggttgtttagttggcattggcgaagcggccctgggggtgtcgatcatgatgttgcggcgctgggaagcttcaggccggttgatggccgagcatacggtcggcggtcatcgccgctacgacatggcgaaattgcccccagagatgtttcgtgcacaactggtgttcgcgctgtgcgaggccaaaaatgttgaagtggtcattcttaaccaaggccaagacacaaactttgaagaagaccttgccaaagatgtgctggagatcatgactgtgttcagtgcacggttgtacggcagccgctcgcgcaagaaccagagattgctggaggctgtgaagacagcggtagaggcatcgccatgctgattgcccaccgtattgcgctggacccgaacaatgtgcaagcgacccacctgtcgcgtgcggcaggcgtggctcgttttgcctataactgggcgttggccgagtggaggcgtcagtatgaagcatgcatgtatgttggacagcgcccttcccaagccatcgcaacattccttgcggcgacaactgaacgcaatcaagcgcgagcagtttccgtggatgagcgaagtcaccaagaacgcgcctcaaatggcgatcatccagttgggccgggcattccagaacttcttcgcaggtcgtgccaagtatccgaagttccgtaaaaagggcatgcatgaccgattcacgctgaccaatgaccagtttgaccttgaggcttcacgcattcgcattcctcgcctgggctgggtgcgcatgcgtgagacgttacgctttgcgggaaaaatcatgttagccaccgtgtcgcgtgtggctggacgttggtttgttagcatcaccgtggacgtgcccgatccatcacatctacctcaagccgaaaaccaaggcacggtgggtgttgatctgggtgtgttggtgctggcaacgctctcgaccggagaaacagtctgtggtcccaggccccatagggcgctgctgggtcgcgtgtgcaggctttcacgcagtgtgttgcgtaaagtcaagggttctgccaatcgtcacaaagccaaagccacattggcgaatctacatgcacggattgcagcgattcgcctggatgcactgcacacactcacgagcgatcttacccggcgctttcacaccattggtattgagaacctcaatgtcaaaggtatgctcaggaatcgccatctggcacgttccatcgccgatataggcttttttgaattcaggcggcagcttgaatacaaggcgatgatgcgcggggggcaggttgtggtggctaatcgtttctttgccagtagcaagaggtgcttgacgtgcgggcacacgctcaatgagttgccgctgtcggtgcgccagtgggcgtgtccagcgtgcggcgcacgtcatgaccgcgacgtgaacgctgcggttaatttgaagaacatggccgtgagttccacggtatcagcctgtggagaggaaggcgctggccctcgtcgcaagacagcggtgggtgaagcaggaagtcagctttgaatttgtttaaacagatttgagtaggtatgacagaacggcgcgcgctcacgcctctgcaagtgctcaagcttgtttatttggctcatgggtggtgccttggcggttcacaggcagccgttaattgatgagcctgtggaagcgtggcgggcgggtccggtcattcgctcgctgtataacgccattaagcagtacggtagcagtgccattaccgagcggttgcctgtgcgttggttttcgtgggggcgtgctttgaagattgacgcaaccgcagcagccatcttagcgagcgtctgggctacttataggcgctatggcggcgttgaattagcggcgatcacgcgtgcggaaggctcgccgtggtggacgacatggaaggagcttaacgggaaggcgatggatgccgagcgctgggtgatagataacgcacttatccaggcgttttatgcgcagaaaatcaaggcacacaacgccggagaaggtgaacacgcggcccttactcagtagccgtccgaactgcgcggcggcaatgcccccttacagcctgctggccagagcggttcgggcacgtcggtcacgcagaaccaacgcccaccgaccggcgggccttttatggggggatgcgtgccgccccgaggatcgcgaatgacctcatataacccatatgccgtgtttagcatgatccatttaatcgctttattgttaaccaacgcatttcctcgtatcacgcacgtgatgtacgtgtcgccgtccatttgcggcatatgactgccgccagtcataaaaactgaaatattgtggcatcgtggcgtagaggacgctaaaccgagctggtgcggtttagtggcagcagtagtgcctttaatccaagagcccaatacaggctcggttaagatgatttcggcaggcgtcctacctggtgtgatgtcagccaatgctgccattacttgtgctttggcaacgtaatgctgatatagcggcagtgcgatcgcagccaagatggcaataataccgatgacgaccataagctcggccagtgtgaaaccttttggggctttcatttacgcgttccttgcaaaagcagcctttacagggagctgctcttcggctacgcagcctgctggccgcagctctagatcaacgttggtgacgcaaaaccatttcccatacagggactcgtccttctttttgtctaaatttttgtggtcatcgaacgtaaaactaccataggcgacgtagtcggttgcgttgcttcgatcaagaagtcggaaccacctgataaacctgccatctacttcggcattaccgttcataatgcaagtgattgagctttccaccgacgaaagcccacgcgtaccggcttcgacatgcacagcgatattgcggcaacggtccgtaacggggggcagcgcaatatcccctgggacatcggtactcggtgcccctgccgcaatacgcgcttcagcgccgatcttgcctggagtgatatccgctaatgctgccgtcacttgcgttttagcaacgtaacgttggtatagcggtaacgtaattgcccctagaacagcgggcactataagcgtgaccatgacctctaacaatgtgaatccttgttgtcttttttccataaaaatatctctaatctttgaaagtgtgctgctatcgattcaatcgaattaatagaataaataaattagacattaataaagtaattatgctagcaacatattgaacgagaaaattagcacataaaatagagagaggagtcgtttatccgcgcactttttatagattcaatgagagatataagaaaaatgaattagacatcactaaagcacttataatacgcggcgctagattgactaacatatcagaaaaaaaaggagaggtgagtcgcataaaatgccgtgatcgcatgtaggaaatgtcctacccccctacggggttccgctcgcttattgcggcagaggcaggccagagagaacgtatgagatttagccggttacacgtgtgggaagcgggtgccagccttttacgccgttcgcattggtgccgtaatagcaagacgcaccaggagtggcggtatcgccttctaggctcagtgtggcgaagccgctggctaatgtacctaccatgttgagcgagtcgatggcttgaacctgcgccgctgtgaacggagttgagtgccgcccgtaatgcgttcatctgctcttgtagtggcgagagggatttttggggctcataccgccttctggcggtttttcgcgtggtggagcatccacatgcaaacgattagcgacgaaagcattaagctcatcaagtttttagaaggcctgcggttgcaggcgtatctatgcgaagccggtgtattaacaatcggctacggcgagaccgctccgcatgtcggcccgctaaacagccggaaagggggcagtgtggccataaaaacgttagaaacaattcccgtactcgttgcggcggttgtacgtgagatagcgcagccgcgcgattgtcccgcttgtcatggtagggggcgggtgtgcgttggcatgttgatgcggtgatcagtcattggttgcgttgttctacggtgatcgcaagggcggcccgtgccagtttgagtggcgacatatctagtaaggtcgatgtgcaaccagggtgccggatgctaagggggactgcagtcatgcggcggatgtcatgtgggcctcacgtggatgcctgaaccagccaagaccatcgcgtggtgcgcgacggcatatggggcgttaacgctgccgcaggcaggaagtaattaagccgctggcactgctggggaccgttgttgcaggtcgtgccgttagttgctggtgcaggtctgtgactggggatgtgatgatgttgctggctgcgttgcgtgccgggtgctctttgattggtatgtcattgtcgctgggatgttgcaagaggcaggacacgtgtgagtgcgatgggttaaatgtagatggtgtgcctcagggttcttaatatgtgtaattaatcacattaatatagtgattattatccgtatttttctggggtttgaatgctcattaccaatggtcaaggtgacgataaaaaacgggagatcctgcgccaatatcgtttgactccggttatgtacacgcggttattgcaagggatggcgttgcgttgctgttgtggccgccctctggaggatggttattaccagtttgatgcgactgaacgcagcactgggaagacggtcgctattctttatgccggggacaaaggctgcgctgcgcgcttttttgatctttctgaggaactggttgctgcactgggtgaaaaacccatgactccgttgccatttttcgaccccttacaagggcagctagaggaagcggcaagtggtgggcgtggcaatggtgagagtcacggtaggagggcgatgcatcctctgaataaggaagtcgtgtgcgcgatcaatctaaccctgatgtgttggggagctttcatacatccagggtcgttattttctaagttgttggaacaaattcgtcagctccctgatcgcccgttgtatgactggaaagttaaagccgttaataccgccattagtaaaggatgccgacggctcagcacgatgttggatgagaagaggccacggaaccccaggttgcgccgctttgaatttcctttgatggaagcgtgcttgcaacggtttgagccgccaccggaaagttatctataacggtattcatcctatcgagtccgttgttctggccgtaggtcgcagaggtgctcttgatcggtgttggagtttagtcgtgcttgcggttctaggcgcaggcgtaagctgtggggtgatggtgttggttggatgttgattgggtgaaggtgagtgattgtggtgtgtgcggatcggtgcaatgtgttcgttgttgttgcgatgttgcatacctgttcggtcattgaatgttgcgctgaaacatcaaggcatctggcgtggcagcaatccagatgttgctggggcagcaggcatattgcggcattctgactttctgtcgatggttttagtcacgaagtgacattgccagtgtcactttaaggtgtgtcttggtcagtgtgcgtatcgtgtttcttttgcaagatagcctggatgcgtgaagcatccatcgtggttggtggtggctatcggtatggaagggtgtccgtcgttggcgtttcccgaggcgctgccggatggatgtgagcgataagggtatccatgttttcatcaatcccattcttgataaggttcaatggatggctggggctgtgttgtcagtgaacgtgttgtgttgttcgaacgcgttgtattgggatgcgcgcattgaatgtgtgtgttgcgcttggaaggtgagtgccactggcctgttgccctgggccgtatccatcgggtgatgtggattccaaacgctagagccacgtttgaatcattgatttgctttgaatcgctttgctcagtgtgccacttgcgtgaggtgcatcgccaatcaatgcggttgagcttgctgtgtttagctggggtgtagttcgatgcagtccactgggcaagcgggcacgcatagttcacagccggtgcaaagtgcagcgatcaccgtatgcatgtgtttagcgccaccgataattgcatcgacgggacaagcttggatgcattttgtgcagccgatacagtccgcttcgacgatccaggcgacctggggttgctgttgggtgccgtggctgcggtcgtaggggcgtggtggtacgccaagcaggtgtgctagggcgtgtgcgccagcgtccccgccgggagggcagcggtcgatgttggcttcgccacgtgccatcgcttgcgcatacgggaggcagccttgaaagccgcattggccgcattgtgtttgtggcagcaagcgatcaatgcgttcgacgagggtgagggggtgaggggtggacatggtgtgtgtcaggttgcacggtatgcggtgagcagcagggtagggtggatggtcgggcaagctgttatgtaagtggtttggtgtgtttggtagcgtcgtgggtgcgccaggtgcgcagggtattgttgttgaggttgttgaggttgttgaggttgtgggagtagtgggatggtgtgagcctttgtttttgcaatggtgtgctaatgccgttcgatggcagtatcacgtgttttacgccggagatgacaggacattctcgtaggcatttccagtgagatcattttggggtgtggcgcgtttgggggctgggcttttttaacgcaccggcatgccgggttgggcgctgctgtcagcatctagcagtgccagcgtaccgctgtcgaagccggctgagaggatcatcccttggctgatcccaaagcgcattttgcggggtgctaggttggcgatgaacacgacgttgcggccaataagtgtctctgggttgctgtagctggcgcgtattcctgagaagatctggcgcttgcccagggggccagcatccaattcaaagcgcagtagtttgtctgacccttcaacgtattcgcacacgagtactttgccgatgcgtagatcgagtttggcgaagtcgtcaataccaatggtgggagcagttgtttccggtttttccgcagtgggtggtggtgctgtgtttgacatggatgcgttttgttgtttggccgaagcagggggaggggcgagggtgtctttggaggcgttgatcatcacttcaatgacttttttatcgatgcgggtgaataagggggagtaggggtggatggtgtggccaccgatcagtggttggttgacgtcttgccatgccgtcactggtgcagcgaggaatgtctccgcttggatgctggtgtgcggcaggattggtttgagtgcggtgatcaggacgcgaaacaggttcaatccttgtgtgcagacggcgtgtagctgtgcgtcggcattgtgttgtttggcgatgatccagggtttggtctcgtcaatgtatttgttggcttcgtcagctagctgcatggtttgacggatcgcgctggcggtgtcgttgcgttcgtaagcgtcacggatgggggtcagtgctgcaacgaattgatcatattggatgcggtctggcagggtgtcggcgagttgtccgttaaaacgcgtgccaatgaaacttgcgcagcggctggctaggttgacgagtttaccgactaggtcagcgttgacgcgtgcaacgaagtcactcaggttaaggtccaggtcgtcgacgtctccggaggatttggcggcgaagtagtagcgtagtgcgtctggttccaagccagcatcaaggtaggtgcgcgccatgatgaaggtgccgcgcgatttggacattttggcaccgtccacagtcaggtagccgttgacatggagccgggtgggggcgcggtggccggtgccgtgcagcactgccggccaaaacagggcgtggaagttgacgatgtctttcccgataaaatgatgcaattctgtcgtggtgccgctgcgtaggtgtgtgtcgaagtcttcgccaatgcgtgtgcataaggttttgaagctgcataagtagccgatcggtgcatccagccacacgtagaagtacttgcctggctggtttgggatttcgaagccgaagtagggggcatcgcgggagatgtcccaggggcgtaggccgcctttggcatctagccattctttgagtttgtttttgacgctaggcaaggcgacatcgccgctcagccaatggcgtaggaaggtgtcgaagtgggccacttcaaaaaagaagtgttctgagtcgcgcagttctggggttgtgccggagatcaccgagtatgggtttttgagttctgtggggtcataggtggcaccgcatgcttcgcagttgtcgccatattggtcggttgcgccgcagtttggacaggttcctttgacgtagcggtcggggaggaacatgcctttggccgggtcgtaaaattgggcgaccgagcggcatgtgatatgtccggcctgtttgagtgtgaggtaagactgttcggtcaggtggcggttgacgggggaatgtgtggagtcgtagtggtcaaaggcgacgttgaaggccgcaaagtcgcgttcatggctggcttgggtggtggcgataaaggcttccggcggcatgcccgctttttctgcggccagcatgatcggggtgccgtgggtgtcgtcggcgcaaacaaaccaggtgttgtgtcctcccaggcgccgtgcgcgtacccagatgtcagcttgaatgtagccgaccagatggccgaggtgcagtggaccattggcgtaaggcagggcggtggtgacaagtgctgtggtcatgaaggagagtggtaccagggggtgcgagtatggcatgtccggtgattgattcaggtctctcgtagccgtgtatcagggtatgtaattgcagtgtgttgcatcgtgcttgcccaaaaaaacaagggccgacaagccggcccctgtgtcgcactatgcggtgatgattaatggaatttgtagttgaacgtcagcatgtagcggcgtcccagcccgtcgtatacgtatgggaatgccactatcttgtcagtcgcgttcaggattgccaggttgagactgctgtgcttgtcaaatgtgtagccgatattggcgtcgtaactggtgtagctggggatgcccaggtagtcacgtgtctctactgtattggtcagactgtacagcgcagcgcttttgtaatttgcgctgactccaagattccaggggccggtcagatagcggacgttccattggaattgacgtttggaataatcaatggtcccaaccgattcttcagccgggatatcgagagcggctgtgtactttaggttcttcgggaaatagccatagaagccgaggtccaagatcccgctcccgccccagcgcagttctttcagatcaaaacggtagttgacctctgcggtccagccacggaagttgatgtacgggccattggtatattctgtccggacactgctggccacgccggtgcttggatcacgggtgatcatgctgcagaagcggttggcgtttggtacgtcgttgcgattgaatgtttcgttgtcaaagcaccctgaagtgatatctccggaatctaactgggtgatcacattgctgatcttgatgtcgtaccagtctgccgccacgcgcaggccgtgtgcccactctggttggaagacgatgccggctgtccaagatttggcgagttcgttttccagtgtgggattgccgctcacggaaccaagctgactgcttggggcctcctggaaggtgccaggattcacaccgctgtagtgtgcgaagaacgcttcacagttgcgctgacgcagctccggacggttcccggcagtgatattggcggaggtgcaaggctcggtgatgaagaagtagcttgactgttgactggtgtacaactcaacgatggcgggcgcgcggaaggagcgggtcttattcccgcggagttggagaccttggaacggttcgtattggaggccgtaggtgtaggccgtgaaccacccgttgacggtgttgttgacgcggcggagtttggcggttagatcaaggcgatgcaggccggggaggtgagcgtccggattgactagcggcgccaggatctcgccgaagtactcattcgtggtgaatgtgccgtgtgagccggtggtcggtaccgtcctgcccaaacccagacgctgatattcgtccggggtgaagcggccttcttccctacggcgttcgtaaccaacgttgaagccgagtttgccacccggtaagtcgatgaaactgccggacaggttggcattgaatacagtttgcttcatctgtgctttggcatgtgtgggtgtcgtgacgtaattacgcgccgccgctgaggcaacgccctcgccaaagaggttgagcggcacgcagttcgggtccacggtggtccctgctgcactcgaattgcaaacaatctcgccagcactgttacgcgttacgttaatggcgttgatgaagtgttgttggatcagacctgttttgtaatagtcgaagttgccttcgccatgattgaggctggtttcccaggtgaacgggtgtccgcctgcatcgaagtgaccgttaaggcccgcgacggcacgccatagccgggtatcggtgctggagttgccgatgaccagatcgcgtgaggcgcgcgacagtcggaaatcggtgatccccagttggcgcagtgtctgccggttctgctcggagagaaacggattgccgatgttaaagttcaacgctccgctttgatcgccgctaccgttgacattgccggttccgaaaccggctgcgttgtacatgctctgatcggtcaactcgagtgcttttgaagtgtagtaggacccctcaaagaagctgctgatggtatcggtgacgtcgtagttgccgagcatgaacaccgatttgcggtccaactgtgaggtgacttgtgttgtttgattgaggtccagcccatcgccgccagaggaggagctattgccgaagttaaccccagggttgtaggagaccaggttgccgtgtgtgtcgaattgcaggaattgatcttgatttgggccaaaaccgcgtggttgttggctggcgtcacggatgtaacggccggtgcttgggtaaagcagaccgccccaggtcatgttgttaatacggcggttgcggatgagcactctgccagggatgccgtccgtgttactggtgttgaacgggatagtggggttcacccgtccgtcagtcgcgtattggcgcccaggctgaaactgcgcgatcgctgcagcatttggattggtttgcgttgagtagccgttgcggtagtagcggcgtgcctcagcgagtacgcctgcgttatcgtccgcgtccagagcaatggtcacgttgccccggtgattggcaaagttgctgcccagcagtgctgagtagttgtagcgcgcgttgtcaccgcgttcggtcagtccatagccaatgttgacttctgcgccttcgtagtttttcttcagaatgatgttggtgaccccggagatggcatctgagccatacgtgggtgcgccaccgacgccgatggtttcggtgcgttcgatcaatgaggtcgggatcacattcagatcgacctgggtaccaccgctgcctgggccaaagacggtggggggattcgaggtgactaaacggcgtccgttgaccagggtgagttgacggttggaaccaagcccgaagcggccgaggaagctgactccggcaccaaaacccgcctgattgccgcgtacactggcgccgctgtcgaagccaggttgtgaaaatagtgcatcggcaacattggtgaagccgaaactgtcaatgtattgtcggttgacgaccgtggccggttctaacgtgtcgaagccggcgcgtgggatgcgtgatccggtaatcacaacgcggtctagttcggtggttttgctctcgtggggtgcagctttgctgtcttcgttcgtgctgtgctcggattcggctgccgttgcgttggctgtataggtcgcgatcaggagcaatgttgacgctagcgccagcgctaaatgattcaacgttggcgtgtatctactgaatgtcttcatttttgcgttcacctaataagaatgtgttgtatggatgcgtgtctaaggtgattgttgcaatttgcagcataacgaaaatttaactccatgtttgctcattaaaattgaattggaaagcaattcaacgttgttttttatttcaattcgtcataagccacgtgccaatgcaacttgtggtgcgccgcttaagagttttttggggggaatgggatatcgaaggtcatcacgtgcaacgcagaatgcagttaacttgtgagtggtttttactgctgcttctttttgagaagtcttaaaagcataaaacctcagttcgaaggttatgcgcttattttttgttaacctattgtttaagataacgaaattatcgtttaatttaaattcattaaattgtcaagaattttagggcgcgctgtccgttcatgggtttacctttctgatatgcagtgtgttacggcgtgactttcctgatcggaatgaatgtgtttaggaaaggtcagaaatcgagggacaatggatgtcagccgccgtacagtgccttgcgtggagcgccggtgatttcggcggcgagtttggcagcacttgaagggggcaggtgttctttaagcagtgcgtagacacggcgtccttcggtgatcttggcggcatcctgatcggcggcaccttgtacgataattacaaactctcctttacgctgattgtcgtcgttggcgacctgtgtttgtaaggttgccaaagtaccgtcaagtacggtttcaaatatcttggtgagttcgcgtgcaaccactgctgcacgcatgctgccgaagatggttgctaggtctgtcagacactcggcgatacggtgtgatgcttcgtaaaagatgagggtgcgtggttcatgcgccaggtgtgtcaggcggtcgcgccgtgccgttggtttggctgggaggaagccttcgaaggtaaagcggttgctaggtaggccggagacactcagggcggcaattaatgcgcttggtcctggcactggggtcacccgaattccagccgcacgtgcagcacggaccaggagaaagcccggatcgctgatcagtggtgtaccggcatcgctgaccagggccagtgatgcgccgctgatcaatcgggtgatgatccgctcggccagcgtatcttcgttgtgcgcgtgtagtgccaataggggccgttcaattccaaagtgggctagcagttgccgggtatgccgggtgtcttcggcacatatcatggtgacggtgcgcaggatgtgctgggcgcgtggcgataggtcgcccaggttgccgatgggggttgcgacgatatggagcgtgcctggtgtggacatcggcggatattttttgggaagagtaaaatcgtagcgtttttcacctgcccgcttcggtgggccttgctgtatggatgctcaatgaacccgcgttttgcaaaaattttctttccgttactggtgacgatattggttgccgggtgtgtaaccacatcgactcacgtgttcttaccccacaaaagtgccggattagtcttgttggagcagggcaagccgcgcgaggcggcgcagcagcttgaggctgaggccagccgggccagtggtgctcaacacaaccagttgctggcggatgctgcttttgcttggcatgaggcgggggagactgcgcgcgcgcaagtgctggtcaggcaggtgagcgtgcagcagctgactggtgaaagtaaggcgcgctttgtgctgttgttgggcgagttggcgttggctaatcggcaaccggtgcgggctttgcagtactttggtgagtcattgtctgggctttccccaaaattgcagatacgttggttgttggggcgtgctgcggcgttggaggccaacggtgatgcgtttggtgcggcgcagcagcgcgcgcgtgctgatcaagcattgcttggtaaggcgcgtaatgaaaatcaggcggcgatcacccgcctgcttgctggtttggatcatggggtgttgctcactcgcacggcggcgctgccagtaggtgatccgctgtatcactttgctggacgggtcttactgagccgtggtgagacgctcccgcggcctttggaggggagcgtgcaggggagtgtgggcagcagtcagcgcccatcggcggatactgatgggtatcggccaccgtcgaagttggcggtgttgttgccattgaccggaagtttggcgacagcggctgcgccggttcgtgatggttttctcgctggttactatgctgaaacccggcggcgtccggatctggatttcttcgatacagctagtacgccagccggagccaaagcggcatacgccaaggcggtcgcagctggtgccgattttgtggtgggccccctcggtcgtgatgaggtgagcgctttgtttgctcaggggcaattgagcatcccactgctggcattgaaccgttcaactggaaatcgcgtgtcgttgccgtcagggagtgccagtttttcgttggcgcccgaggatgatggtgtgattgctgctgactatttgttggctcaggggcagcgcaatgtgatcgtgatcgggagtaatgatgatgttggtcggcggggtgtgcaggcgtttatggatcgcttccgtgcgcgtggtggccaagtgctggcggcgctgggtgttgctgatgtccccggcgatcttggaccccggctacgtgacgccgatcgtgctgatgcggtgtttcttgcggtacgtggtcccactgcacgggtgttggcgccgcagttggcgtcgttggggttatcgagtaaacctcaagtgggtacttcgcaattggtgttgggaacggggaagcctgaggaagatacgttgctggatgggattgtttatcccactgaaccgtggagtgtgcagggggtgaagtcaatcccgtccgcggcggatgtggcggtacgtttgccaaatatgcggggcgcggcgttgcggctgttcgcgtttggtgtcgatgcttggaggctgtctgtctatctagagaggctgtctgctggtggtgcgggtggagggctgagtggtgttacaggaacgttacgtttggatgattccggtaacgtgatacgtatgccgatctgggcaacattcagaaatggtcagagtattccggtggagatgctctgagtcatgttgaatcggcgcgagtgcggtgcggcagttgaagttgctgcgcgtcggcatctggaacgggctggtttgcgttggttggcgagcaatgtgtgtttccgtggcggggagttggatttggtgatgtatgacgtgatgagcgttgtgttcgtcgaggtgcgttaccgtcagcaagagaatcatgggagtgctgcgcagagtgtggatcggcgtaaacgccgtaagctggtcatggcggcgcaattgtttttacagcgtcatccgtttttagcgcaggtgccgtgccgcttcgatgtggttgagggggcaggtaggccgttacagttgcattggatccgtgatgcgttccgtctggatgattgttgagatgctgtgtacagcattgatttgtgcaggtgtcgcatacgttgcatgtgatgcagtttaaggaatgaatgtgtagaaacagagcgtatttcctgttggtgttctttatgcgccatgctggggcggtgctgaattgctccgtatcttcctggtgaaaggtgttggagattgttctcgttggcgatatcactatttatttatgcttggatatggggatgggtgtttaaggtgttgtggcaacaatccggtgacaggcacagcacagcattttggaaaaagacaatccgtgcctacgttggaatgggtgcatgattgagcctgttgttgggtatcggatgcttcaagcgattggctggccttggccggggccgcctgctgatgcggcgtggcaggcgatgtgtgcggtgtattcgcagtgccgtccggcacgggtgattgagcagcatcggtccggttatgtggtggctgaggcgccggaggtccccatcaaggtcgagtcgctgccagcgtggcagcgtcgcggtttcccgcgccatgagcgcgcggttgtgggagattgggtgttgttggatggtcgtcgcatcgtggcgttgttgccgcggcgtacagtcattaagcgtttggcggcgggggaacattaccggcagcagctgattgccgccaatctggatactgcatttatcgtgtgtggattggatggtgattttaatccgcgtcggattgagcgttactgcgtgttgattggtagtggtggtgttgagccggtggtggtgctcacgaaggttgatctgtgtgctgatgtcggggcggcggtggcggtgttgcgtgagcattcttctcaggcattggccgtggtggccgttgatgcgcgcgaagcggagcctgttgcggcgctgtatccgtggttattaccggggcgtacggtggcgttgctcggttcatcgggtgcgggcaagtcgacgctgacgaacacgttgcttggcgaacagcgtatgaaggttggtgaggtgcgtcaaagggattcgcgtggccgacatacgaccacgcatcgggcgttattgccgttgccatccggggcttgtttgattgataccccagggatgcgtgagcttaagttcaccggtgaagaggatcttgtcgaagagtttgctgacattgagttgctggcgacgcagtgccgttttcgtgattgtgcgcatcaggctgagccagggtgtgcggtgcgtgcggcgattgggtgcgggacgttggatccgcagcgtctgcatcattactttaagttgcgtggtgagattgtcggggcggcagacaggtcgacgttacggcgttattgagtgtggttgttctccttgaggttcttcgaatgcatttgcattgtcatgaccgttgtcgcattccgtcgctgtgcgtctgctgtgtatcgtcgtggagtgtgtgttgatgtgcggctgtcgctgtggtcggtgtgtttgcggaaatggagttcggtcagaggctttggcctttgtaggagcctgtcgatggggaaggttcggttgtaggccgcacgtgttctttatccgccgaaattcagtgttcctttcatcagtgcccagtggccgggaaatgagcagaaaaaggtgtaggagacgtttttgctgagtgtgttggttgggaaggtgatgctggtgcgctcgccgccgccgatgatggcggtatgggcgatcacgcgcggatcggctttgggtacatagttgtctgcgagtgtggcgtgtaatccggccagtgcgacggcctgcatatcggtggttttagttagtacccagttgtggcccatgacgcgggcgctctttttgccggtgtgtgtgagggtgaggttcacgtgggtacattcggctgcgattttgatggtgttctggtcgaacttcatctgatcgtttgcggaaatcgtcactgcacatgttttggcccagagcgcaggtgaggcgcatagcaggatggcgggtaggacggtgttgcgtcgcagtttcaaggtggcccttcctgggaggaggtgatgaacagtctagtgattttaggcgtctgttggttgttccggtagcgacaattgttcgcaacaggcaatggtgtaataccaggttgcaatgtatccgattgagtcgctcatgcttgcagtcctcactgtggattggcgttctgcgcggtgcatgtcgccggtttcacgtgttgttggcattcactgggcatgagtggtgagtgtggtgcgaatacgttagatggcaggtaggttgttggatgatgcaaggtgcaataggcagggcaggcctgcttgacaggatggcggtcaaggtttgatgtcagtgagtggctgtgtgtgtttctaaacagtgccattgatgcggcgtgtaggtcattggtgatgtgatgtgctcggggtgttgagtggtgggtgtgctgtgtgcattgagctgttcccaattgtgctgcaaccttggtcgttggtgcttcgtggtgcggcggaatgaacgttggaagtggattactttttgatggcctgaatgatgtgaggatgcgcaagtcgctggaggttcgaaacgtgctgcttgtcagtgctcggggtttttagaggcgctggtgatggcaagggccgcgttattcggttgtgtcaatcagtggatgctggggagtgtttgggattgatccagtcatctctggatggtgaggcgtgtgagtgggtagataggtgatcacgcaggagctgggtttgtggattgtaagaagagtgggcgtgtatggttgggactagtcggcgtgttgccgtgagtcatgcggaaaccatccgtttcaatattcttttgatttctttggtgccggttgttggtgcaggttgcttgaaacagccgggtggtggtttgctgattgtgatgacgctgcgactgtttagggatgacaatgtctgtattgccttttttaatgattgaaacgggccagccgttgccatcggtgaggcgctatgggtgtttcccgcactggattcgtgttgcttcggggttggctgagtcgcaaacggttgtggtgaatgtcgaagcgggtgagaggttgccgacacgtgaggggttcgctggggcgctgatcagtggttcggcagcgtttgttaccgatcgtgctgattggagtgagcgtactgcggagtggttatgtgaagccgcttacgctggcatgccgttactcggtatttgttatggacaccaattgttggcgcacgcgcttggtggggaggtggcatgtaatccggctgggcgtgaatccgggacgattcagttggaattgcatgcggctgcgtttgatgatccgttgtttgcgaatttgccaaggcacttttcggcacatgcgactcatgtgcagacggtattgcgtgcgcctgagggggcggtggtgttggcacgctcggcgcaggatcagtgccacgcgttccgatgggggcagaatagttggggtgtgcagttccatccggaattcgcaacgcatcatatgcgtggttatgtggctgcgcgtgctcagtgtttacagcgtcaagggcagtgtccgcgtcgtatcgcgcgtcaagtcagtgcggcgccggtggcgcgtcaggtgttgcggcgctttgtgcgtcatgcacgtcgtgccgtttaagggggaggttgggcagcgctgttgtgttcatcgtagtgtgggattgcagtgtttcaggagcggatggttttctgggatgttggggtctctggatggggcatctttggtttgaggtgcagcagttctaaagtgtgtgggcactcttcagaagtggttagcggcggcgaaatatcttgtattccgaagccgtctctatctgtgctatctggaaagggtgataatcgtcgcaatgtgctgcgtcttctggcacggtattggagtcgtaagtcaatgagtgagatccgtaaagtcccggcgaaggccggtgcgcactggttgtgggctggctttgtattgctgtggcgtgcgccgttgcgtttggggggactgggcctgttgtggggcgtgttttcctcattgttgatgctggtgggcttaaagtggccaagcgtgctgtattacgtgctgtttctgatggttctagtcaccccactactgacggggggagtgctgtgggcattacgcgaggtggatcaggggcgtactgcgcgcccgagagatttattgcaggggttgtacgatggacgggcaccgcagctgctgatggcgttgttgccgcaattgctagctctgattgttacatttctggtgattcgctatagcgctttgcaagatattttcaagcttttgggggatatcaatgctgtagatgcacaggttgattcggaggcaatccatcaatcatatgttgctccatctaagtcacttattcagttgtggtcgctgtttttgttattgatcttcgcggtggtggcgatggctttgtttgtgatgccgccgcaggtgatgttccagcgtgataacgggttacatgcgttaaagctgagtttgtatgcttgtttgcgcaatcttccagcgttattggtgtttgctgtgttggctttcatcgtgacgattgtggtgtttgttgtcttcaccattgttgcaacactcattgcggcgctgatagtgatggcattggggcttgatcaggtgttttttgggagtttgattaatcaagtagtgatgcagctgctttggatgccggtgctgatcccggtgtttaacggggcggtgtacgtggcgtggaaacagatgcttgctcacggcgcgttgccgtcgtcgcctgatgatgtgttggctgcttagtagtacgcttggggagtgaatgtgggggcgtgctgttgcacgtccaacgtgagcgatgcctcaagcctcaagccgttttcgggtgggtgaccgcccaggcggcaacaatgccaagctcgtagaggaggcacatcggtattgcgagcatgagttgcgagacgacatccggtggggtcagtactgctgcaaagatgaagatggcaacgatcgcataaccgcggctttcacgcagttgggttggtttgacccagtgcagtacggtcaaaattaccatggccaccggaagctcaaagctggcaccgaaggcgaagaagatggctagtacgaagtccaggtaagcgccagcgtcgggggtcagctggatgacgtctggtttgaacgtggtcaggaaatggaagactgcgggcaacaccaggaagtaggcgaatgcgcaaccgatataaaacaacacgacagctgagatcagcaaagggagtgccagtcgtttttcgcgctgatacaaaccaggtgcgataaacgcccatccctggtacaacacccagggcatggcgatgaataggcccagaaagaaagtcaatttcagtggtgcaaacactgctccggcaggttgggtggagatcacgctctgtccagcgggtaattgcgagatgatcggtgtcgccaaccaacggtaaaggacttttgagaatggcagcagcgcgctgaccaccaagccaagaccgatcaacatccgtatcaggcgtgcacgtagttctatcaagtgctcaattaggctactttcgctctctaaatcgtccgatgaggtcactgcgatttttcctggccattgttgccatgggtgcttgtacttggggggggggaggtcacatggacgtgatggacggcggtgcccagttccaatgtgttggtgttgcgatcggggtgaatgtcgcgttttgtctgctcgtgcagtatggatatggagttctggatgttcatatcttgttggttgctttgtaactgcgcttgagcgtcgtgtatcacctgctgtgcattttccaggttgcgcttcagtgcttcggcttctaactcccgttccaattcttgtttgatggattcccactgtgtgcgtgcgcggcgaaccaacaaaccagcaaagcgggctgctttgggtaagcgttctggacctaaaacaaccagggcgactacagcgatcaggagtagttcgctaaaaccgatatcgaacaaggtaaatagcccgcgtctcagtgcttaccatgatcctgttggggtccggaagcggtgctctgggaggtgctgccaagctgatcggtcggtttgtcgtcttcgcgtaggctttttttgaactctttaatggcgcttccaatatctttggcgccattggcaagtcgcttggtgccgaacaccaacaggacgatgaccagcacgaccagccagtggaggaggctgaagctgcccatgatttgctcgctattgcctgggaaaagggagaatcagcatacctgaacaaaccgacatctgtaaggatggacgtttagtggtgatcgagagcttcggtgtggatgtcatcttcggagactggctggaagccttgttgtactgggattgcggcggttgcctcggattgaatcggggtcgtcatggcttcctgggttgccttggccgatggtgtcactctcactgttgtgccagctctgggtctgctggtgtgttggtgccatccacttggttttgtagtcttattacggttattgcgtgctgtataagtgacttcctccaggcgatcacggaacgcgatcacatcgctggagggaggttcggcggttcggccttcgaaaatcatacgtggagtggtgcctttgccataaacgtcaaggttggcactgtcgtcgatttgaagtgcggctccgtctagagcgataccagcaaacaggccgcgcgctgttgaccaagagtagatctcggcctttagctcgctatcggttgctgccaacgcattacgtccaacgggacctgcggccacgctggcatccgcgccaagagtaaatttgccgttaacgatgttatccaagttgcggtcattgcggaacacgagtaccacgtcggaagattgcacgccggcttgaaggccgatgctgccgccggtcagtttcacaaatacgggttgagaccatgtgttttgtggggtcttgatcgacatgaggccttggccacggcgtccgccaatgatgaagcccactttgagcgtgtcgggaatgatgacgatcgcacgtgcttcttcgagcagtttgtctggaatggtttgctctgggattttctgaagctcggtcagcacgcgtagcgcattgcgagcgcgctgatcttcttccgggccggcgaacgcgtgaccagcagcaagagcaagcgacagcagcatggttaagtagggtaggcgaggcatggcaacagactcctagagtgattcgagtgcggaatgtcaactgctcattacaactcaaactgttatccgtgtgctgaatcggtaatgagtgtgactacgttcctttggttatcggcatgacttgccgatttgcatgcggcaagtgaggtcacgttcagtcacaatagcacgtatgaatcacacttctgatactgctctactgattgttaatcttggtactcctgaggcgccgactgcggcggcggtgcgccgttatctgggcgaattcctgagtgatcgccgcgtggtatccattccgccgttgttttggaagccattgctgcatatggtgattttgccgattcgcggcccgcgttcagccagcaaatacgccaaagtgtggttgcaggaaggctctcccctcagtgtgtatacccgccgtattgctgaagggctgacgcaacatctgcctgattggcgtgtggcttgggcgatgcgttacggtgctccagcattgacaaaggcgctagatgcgctgcaagcgcagcaggtacgccgcatcgtgatactgccgttatatcctcaatattcgaccaccaccacggcctcagtacaggatgtggtggaagcgtggtgtaagcgtactccgcaagtgcaggttgaatgcattcaagactatgccgaggactcagcgtgggtcgccgcggtggctgcttcgatccgtaggcattggcaagcacatggccgcagtgagaagttgatgttctctttccatggactgccgcagcgtgtggccaataacggtgatccctatccgcagcgctgccaggtgagtgcgtctttgattgccgcagcattggatttgaatgagagtgagtgggtgctcggttatcagtcgcgctttggtgctgaacgttggttacaaccatatgctgagccaacgctctgggcgcttgccgagtctggcatacgtcgctttgatcttgtctgcccaggtttttccgttgattgcctggaaacattggaggaagtggcgctcggtttttcagaaacgctggcagcgcgtggtgcaacgatgcgctacattccctgtctcaatgatgacccggcacatgtgcaggcgttggctggactggcgcaacgtgcgttgctgtgaatgcagcagcgttctcagtgcattgcgctgtgttgtagtgcagcgttgccaatgctgcatttttagtgcattggtgttgcggcggatgaggggatgtgccgattgattttgtcgtagctaaagctttctgcgagcgcgtctgcattgactgtatcggcagcagaaacagcactctgagtgatggtgtatcagtccacaggcggtgagtgtggatcacggttgcaccagtgcagccgctagagtttgcttgcagaggcagtgattcaaaccattgagggtattagcaaaggggaagagtgtgttttgaagggggtgttgtgtaggtgtcgtgtcgtttattcggtttgcagcaagcggcgcagttgtgctttcagtatccgtcctttgagatggaaatagtcccgttcttcccgccagagggggaagcggcattcgacctcccgccagaatgccggcgagtggttagcttggatcaggtggcacaattcatgcactaccacatattcgaatgcggaggggcgaccgagcaccagtgccagatccagcgccatgtggccggctgtggcaagcgacccccattgcgatgacatgggttttaggcgtacccgggtcggtggacgtggcaggcctggtaggtattttcgcagccagtcactgatgtctacacgtgcttgcacttcgtaaaactctctgagtgtgtggcgtagtgtgttgtcgttggtgtgtgttgttatataaaactgtaggccatgtgcatccaattccagccgtgtgtagcggctctcgtgccaatgcagggggagttgttgatcgcgcagtggtagggctgtggtttcgccgcgacgcagcggtatcgttgccgccgtaccgctggcatagcgagccatttgtgtttcgatccaggcgcgctgttcaagcaaaaaacgggtgccagcgtccaggtcggcgcatggtggcaggatcaggcgtacaccgcgctcatcgacgctcagcttaatgcgacgcgcacgcggattgcggacgcatagcacgttaatttcacatccctgtgtctgcaacgggatgttgtcatgtttgaactgatttgtaggggggggcatcagacaagatgagtctgcaaagagtgctccaagcataacgttggtcagggcatagacgttactgcatttagttgtttgctttgctcaacttcagcggaacttctaataggagaaacagtcgtcgtatttcggcactcatcaacgcgaagcgcgcatcaagttcagcacggattccatcggtgtcactgtgttcgagctggtccaacatgccatcgaggaattttagtttgcggatgaccaggtcgtcaccgagtacaaatgaaacgtggtcgtcgagtatgagtgccaatttgcttacttgcttgccaacttctaagtgtttgtcaatttcttcgcagcgtagcgcttggtgctggcacttgatgattgcaccgccttcggtggcatccttcatttcgcactcatcacccaggttgaggtgttcgggcagtggctcgccagcaatccaactcgtcagcatggagcgtattgaaatctcggcgttgagcggcagtgccggaaagctgccaagcaagtcgcggatctcgctgatgacggtttcagcggctttgcggcttgcggtatctacggccacgtagccgtaacgtagatcaagcattgcatcaatgcgggattttttaacgaaagcgcgcggtagcagttcgtggattaaatcgtctttgatgcgtttgcgttcacgtccgcctggagggtggcctttcttttcctcaatctcgctgcatttacgcgtcagcaggtcgttaacgactgaagcaggcaggattttgtcttcactgccgacggtcaaccacaggaagtcgccttgacgttggttgagtacttcctgctcttcacgcccaaagggggagataaatccacgtgatgtcatttccaatgggccaaccggtcgcaaccgtgcgttgggtagtatgctgtcgatctgtgagaaatccagtgacgttgggaagcgaaacaaggtcagattacgaaagaacattgcgtgtccggatggaaatggaaaggggaataggcgctctatggagccgtgtcgttggcgaggtccccagccagccaagcgtgtgcattaggcaatggggtgttgctatgtcgacccaatgcctggaagtcgaatagggattggtcggctaattgtgaggggcgaatattgcccagtgcacgtgcgatttgttctattcggcctggatattctttttcccatgctttgagtatcactcccacttgcttgcgttgcaggttttcttggctgccacataaattgcagggaatgatcgggaattcacgtgcatcggcgtaagcaatgatgtcggtttcgctcacgtaagccagtgggcgaatcacgacatgtttgccattgtcactgcgtagcttcggtggcatccctgatagcttggcgtggtgaaacagattcataaagaacgttgcaaccatatcgtcgcggtggtggcccagcgcgattttggtgaagccttgtgtttccgcataggcgtacagtgctccgcggcgcatccgcgagcagagcgcgcatagggttttaccttcggggacgacacgagtcacgaccgaataggtgtcttgctcaatgatatggtggggcatgccaatgctgcttaagtattctggcaagacgtgtttgggaaagccgggttgcttctggtccaaattgactgcggttagctcgaacggcaccggggcttttgcacgcagttgcaacaacatgtccagcagggtgtagctatctttgccgccggacaagcagaccatgatcttatcgttggcttcgatcatgccgaagtcagcgatggcttgacccacttgacggcgtaggcgcttggcaagcttgcattgttcacggcgtatcctgtctggagcaggtctggcggtgatgttgcgctgaggggggaaggtcgcatccatagggaacttattgtagctggctgcggtcggcgtgctcactgatgagtgccttgcagttactttctatgtggacggtgatcgcatgtcggtttgaggtgcccatgacagtggtaaagccgtatttgatgtgcaggtatacgatccgggcgtgcaggtgttgtatcaatgaaaaatacagttgcaatcatgatcggtttcttttcgcattgaatcttgagcgttgttcaagattcaatgcgagttgctgatctatgtcaggtgtgttgttgcacgtgatatctgcgtattggtttgctggtttattgatgtcgtgctcggtgttcattggatgaacatgtcatcgggttcgctgatgccgtgctgcagtgtttgtgttagcggcttaagctgagtttaatgattaagtcgtgcttggatgttcaccaaggtgatgggagcagtaactacataggagtcatgttgcagcaattcatttccgtaatccgcaagggatatataaatgaaaaacggactgagtgggatagcgctgaacgtataggattttcacaatcattcgtcagtgaggttgcgattaaaaaagaagtatcggtgcagcagacatcgaatataaatgtaatagtgaaataagctaacaacaggcaagtgtctgtcgttagcttcaggtgttttagtgaattagtccgagtgagtcttcatttgtgccatgattttttcgtgtggaaatgtctgactctatcgagacagggaggatcacgtcgcatggtttgtgccagagacgtgctcggtggcaccagtgcatcactggatgtgcgtcatgttcgtagttgtgatcaatcacttggcgattgctgtgataaggctggctgatcttgctgcggtattgatttggcccacgcgatctgtgggtggcgtcgtttgatagttagatgatgatgtgcgcaggtgcattgattcggtcgatcacgctgcgttttgtgttgggggaatatgccgcccgagaaggaggaggggcgacaattcgatttccatccaggtgctacaacgcggtgtcctaaaaagattctgtgctgttgaacatacccacgcgcaggtctttggcgaaatagatctcacgattatctaccaacatccgtgcattggcctgaccaatgaccagtgtgcggttgatgattttggtcatctctatttcgtaacgcaccaattttgcgtttggcagtacttgacctgtgaacttgacttcgccgcagcccaatgcacgaccgtatccgggggttgcgccgctccatgttagaaaaaaaccggtgagttgccacatggcgtccaggccgagacagcctggcatcactgggtcaccgaggaaatggcaaccgaagaaccacagatctggccgaatatcaagttccgcattgacgatacccttaccgtgtgagccgccgtctgcataaatttcggtgattctgtcaaacatcagcattggatcattcggcaggcgggcgttgctgtgactgaagagttcgccacgcgcggttgccagcagttcttcgcgtgaatacgcatgttgccgggacatcaaaattcctgcgtctagcccataaagggcagtaagcgtacctgagcaatgcggatgcaatcaaacatgacgatgtgtatttcagctgtgatgtgatgtggcgggtgagaattgtctggtttgagtgttgcaatgaacgtttgttgccatagggaacgcaagtgtgggcaatggatttggcatttaatgctgtggtgtcacgttgtgaatgaaagatgccttgaaacgaggtgttcttgcagatgtgttgtatttggcaacgcatagatggcactacaggagagggcgatgcagtgtgttttgtgatgttttgagcaggtattttggtgacttctgctgcattccgatgtttcgtggtacatcggtgttgttgtcggtgtgatggttttgcaacagcgttccataggtgatgtcgaggggtgttggtctctgcgatgtcgcgttgccgcggtgtatggtctgagttagcccgctatcggcatacatactgttttacgttttcctgtttcggcaatgccactcgtggagtgctggcgtggttggcgtcattgttcagtggtggttgcgttgcgtttccaatggggaaagggcatgtttcccgtgttcaggccgttgttgtcagtattcttcagtgttatgcctgctttgagtcgctgtcgtgttttcccaatgagtacgttattgctcgtttattgggaccaggtaatacagatctgcgatgtggacttatgtttggctatttcctcggatggaggagtcagcaaggtgcatgttttttaagcgctatttgcacatcaatcgcattgagatgttttaaacaatgggattgatggtcattagggcgaaataccgcaatgggatgccatcgcgtgttggccacggtgatacgggtattggctgcgatggtgtcgtgcgcgtggcgatgctgttggttggaagagccgccgtttgggaacatcgtgctcgtggcgtgatctgcctcagctttgatctgcgatgtgtttcactgaagccccaatgggctggcttcataaaaaaccgggatggtgtatggaattccagaagttatttgtttggtgacggggggcggtgtagatcaggtgccaagcgggcgaccgtgttaccgatcatgatgacgcggtcgctcggtgtttttgcccgccctgcgtgatgcagggcggatcatgtatatcaccagatcacgacttgctgatcactacggcgaaccattgcgtcgcctggtttgcaattgaatgcttcggcgaagctgggcatattcgatggcggaccgattgtgcggaaatgcggcggggcatgtggatcggttttcagtcgcattgcctgctcttctggggtgtattgtgcacgccacactgttgcccagttatagaagaaacgttgctcacgggtcatgccgtcggtttttgggtccgcttgaccggcggtagcggtcttcatggcgtcgtaggctgtatttagccctcccaaatcggcaatgttctcgcccaaggtcagtaagccgttgacttgtttcccatcctcagtgcggtagctgttgaactgggcgaccagttttgcggtacgtgtcgagaacgctttggcatcggctttggtccaccattgctcgaacttgcctgttggtccaaagcggctgccttggtcatcgtagccgtgggtcatttcatggccgatcactgcaacgatgccaccgtagttgctttccaatggtgcgtccggatcgaagaacggtggttgcaggatagcggctgggaatacgatctcgtttttctgcgggtcgtaataggcattgaccatttgtggcggcatctcccattctgacttgtctacaggtttgccgatcttggagaggttccatgtgtagttgaattgctgtgcagtcagtacgttgcctagataactgtcgcggctggtgtggaggttatcccaggatcgccattgatctgggtaaccgatcttagctgtgaagctttcccacttggccagtgctttggatttagtggctggactcatccagtccagcttctcaatacgtgctttgagtgcggtacgcaactgggcgaccaatgcttccatcttgactttggattcagtggggaaggcggccttgacataaagttggcctagggcttcacctgtttgctcattgatggtgttcaacactcgtttccagcgtggtttgatttctttctgcccgcgcatggtgttgttccagaatgcgaagtgttcatccacgaatggccgactcaggtagggcgaggcattatcgacggtatggaagcgcagataggcgcgccatatggcgacgtcggtatcagccagcatccggtctacttctttgtggaacgctggaatggccagtgagaacatgtctggtagcggcacgccttgggccttgaacgcttcagtccatgaccaatgtggggtcaatttgtttgcctgggttggggtgaccgggttgtattgcagcgctgtgtcacgtgcgagttgttgttgtgttttagagaccttggccagacgcgtttcaaacgcgatcactttctcggcgtgttgggtagcatcggcggccgccattccggataattccaataccttggcgatatgtgctttgtaggcgaggagtttgtctttgttggctggtttggtgtagtactccggatctggaaggcccagtccgctttgactgatgtaggcgatgttgcgggtggggtccttgaaatcgggggatgcgctgagcgtgaatagctcgccctgtcctttggcagcggtgctgcgtaggtaatttaccaacgtgtcctggttggtgatggcgtcgattgcagccaagtccgttttcagtgggtctatgccttgggtttcgatcttggcctcgtccatgccagtgttccataggtcgctgaggattttcttaatgccgctgctttgagggtcggcggcggcgtgttcgatcagttgacgctggatcgcattagagcgttcgtccagcatttggaatgcgccccagctcgtgcggtcgctaggtacaggattggctttcagccagttgccattgacataggtgtgcaggtcagtgcaggggttgccggtcggatctagatccgatgcggtgaaacggatgacgggcggtagcgtggagagatcaatgtcgttggtgtttgtcttgggtgttggattgggtgtagggatcgccaccggtgctggtgcgttacggttgcaacttgcaagagtcatcgcaacagcgagggagagaggcaaccattgatatttatggggcatttcgagagttccaatggtagaggagatggttttgtacagtagaactgtaaacagtatgaatatggtgtgtcacgttggttgttggcgcctctacatctactttagcaagcgataacgaggtgtcaggctccggcagggtatgccgttgttttgtatctgcgtatgtggtggttgcaagttctctctatgagtgagttgttgatgttgctcatcttcttttccgaactagggtgggagagcaggagttgctttgatgatgttcgtcctcattacgttgtgttgtgggttgcttggtcgtgatcgtcattgttctatgtggtggagacgatgactggtgatgctggaggttgccctgcaggtgctgtcagtacgggatgtgtttgtacctggcactggttgtgtcttggaacgtgtcgcggcggagggagttgcattgtgtgctgtggtgcgtattgatcttcggtcgttttgatgattttaggtgcacatgtattgcattttgtatgcgtgtttttggactggattgtctaagacatcgtccgagtgctgcgtgcaatgttgcatcgctggggtgtgtatttttctgctagcaggattgattcaagtagcacccctgtgcggcggtctggtcttgttgacgatgcaaggtgtggtgtctacgtgtattcgggtttgttccgtgtctgctttaggcgggcaggtgtgcgactcatgggatggttgttcatggtaggaggcttattaggatgggccgtggtcggttaaagtagtccgatgcacgatcagatcattccatgtgggatgctcgtcgccatcgaggggattgatggtgccggaaagaccacgttagctcggagtttggcgcttaagttacgaggtgtcgggttggaaacggtggtcagtaaggagccgaccaacggaccatggggcatgttgttgcggcagtctgctgcgaccgggcgtttttcccccgaggaggaggttgatgtgttgttgcgtgatcgtcgccagcatgttgaagatcttattgttccgatgatcggccgtggtgcggtggtgatcttggaccgctatttcccgtcgatggtggcttatcagggcgctgccgggttaccagtggatgctttgcttgaggccaatgcgtttgctccacgtccggatgttctgttgttgctggatgtgccgccagcgatcggtttgcagcgtatctgggagcgggggagcacgccaaatcacttcgaaactacggaaaatctgtcgcgttgccgtgacattttcctagcattggaactgccatctaaacgggtgattgatgcaacggccaatgctgaaacggtgttgtctgcggcactggccttggtgatggaggtattgcgggtgcgtctgggcgcattaggtgcggtggtgttgcggcgtcttgctggctaaggtgtgtgatgtaggggcatcgttctaaataaacaacgtatcagaggtaggtgcgttgttggatgcgcgtgttgacagcttaggtctatcaatgggtgcgccaatggcatgacatgcttgaagcgttgcggattggtgggttgagagtagccgggtttcatcaaggagaaccgttatgtgcaacgggatatgagccgtcgctctatcggcaaggtgcaggaacagccgcaaaagcagccgtcagcgagtccaatgcccgatcgtgctgttatcacactgctgcacacgatgtggtgtggctgtgaagctgatgcgtgaatgaggtaggaggattgtcgagcgatgcatatttgccagtatgtagcgtcaagcatctgctttcttgggccacatgatcaggtcatgccgtgtctgccaggtacggtggtgcgtttgattggaagattttgtttgtgtttgttgggaatatcaaaaaacgatctgtattttccggcgttgtttaagtggttcatggtgagggtcgaatgtcggtgatgtgcatgggagcgtgtgttgtcacggagatgtgatgatcaattcagtgatttgatcatcagttccaagatgttgtggcctttctctttttgaactaagcgtgctggtatcgggagaccggggataatccaggcgctgatttcattatcgccatccgtccgggaaaccttggttgcctgttgggttttaccgttaacggtgatttcttctttgccgacgacggtgtaggtcattggctttattttcccgccatcaaccagtcggtaattcagcagttgcttgccggcctgtacgtcgcggacgatggccaggttgatgaggagtccgtccatatctccttctttgagggccacagggccgcgtcgatcggctttgatgtctccgctccaggttgcttggagggtatcccagtcgtattgggcctgtattttgcgttttttgaccagcagcgttgcaacatcatcattgctgagtgggcgcaatgtgctgtttttttcattgaatatggtgctttgagtcaagttgaccagttgattctggatgtgcagggtatagcgccattggttgttatcgatcatcgccagggtcatggtgctgttggcctgcagacccatgtagctggcttggtattcgatcttaaatggttgcattgccaacgttggcaggctggtaagtgccaggccgatagcagccagggtgcataggatccgggggagtgtcatggttcaagtcccttggtaatcaatgaggcgtagatcggtttcgtcttcactatttttacgttgcaggatgcgtatcggggttggtacgccattagcgatccagaggatggtttggttcttgccgctgttgatctgatggatgcgtagtgcgtcgtaactcaggtcgccgacttgcaacggttccgtggtatcggccgtgcggtagtcatactgtcgtatcttgccgacatcaatgcagcggtagccgagtgtgcggttgggcatggcgtcgcgtatcagggacaggttcagtaataggatgctttggtcgccaggtagaagttggatggggtggtgctgttctttcttcaagtccccagaccattgtgcggtgcgagcattccagtcgtagactcctttcacttttttgccgaataacaatgcttttttcaccgtggtttggctgagtgggacgtagacgccattgtgaatctcaaagacggtgttttgttcaatgttcagaccaagcacgctggcgaagccgcgtcgcccacgtattattaggttcacttgccacacgttgttgcttttgttgtggatgactttcatggctgcgtcgccggcttcttcaccgtggtagaagacgcgataggaggctacgaatggttgcagtggtggtgtcttccattcagcggaaggtaatgtttccggtgtgggtgaagcgggtgaggatcccagttcctggagtggtgtggcagtggatgttgggatgtccttgactgggggcacggtgatgttaggtgccgattgtgtgatggccggtgcgattgcgatcagtagtgctgtcaggcacagaggcacgggcgacaggaagcgtttcatacgtggcacagtccggtggtaataaaaagaatgttccagtgggtgtcccgatgtggtgtgcatggtcaacgggtgagagttccctgtgaatctaggcgcagtggtgtaaacaggtactgagtgtctaattgcggtgttggtccgtcgaccgtcaggcgaccgtttgcaagtagttccaaggtggcgacgagcagtggatgttcgcgtactagcacgcgtttggccaacgtttcggcggtgtcattggtaaggatgggaactactgcctgggccagtaccgttccagcatctagttccggtataacaagatggacgctggcaccgtgttcggtgtcgcctgctgccagtgcgcgtgcatgcgtgtgtaagccgcggtgtttgggaagcagtgaggggtggatgttaaggattcgcttggggaagcgttctataaatgctgcgctgaggatgcgcatgtagcctgcgcatacgacccagtgtggtgttacggcggcgatcgctgcgctgagcgttgtgtcgaaggtgatgcgatcaggggagtcgtgtggatctgcactccaacggtgcgtaggtaacactttggtgagtgcgggtgcgtcggggcgatcggaaaaaactccaaccacttcggcatgcagtcggtcggtcgcgatggcatcaaggatggcttgcagattgctgccacgtcctgaggccaggatggcgaggcgtaaaggggaggagggtgaggtcaaacagtggatttcctgagttagggtaaagggcaagagtagccaagtgtggttggtagtgtgccagtgtgtgtccagtaagggctttgctggttgttgcattcaccaaggcagcaacgcaatggcttgaggcaactcagctgcgttgatgcaggtgaacgtaagcaggtatggatgagtaccgttggtgtgacgatcagtattattttagtggaagcaagatcacgtgttgttgtgaggtagggatgaggtcgatgctgaggcagcagggatacctcagtggggtgtggtgtggatgtctctgttgttgtcacttcagccgatgtgtacccgctcattgccaacaggggtaaagacccggcctatctgccagtgtgccaagccttggttgtcaagtgcttgtcccaggggggctacctggttgggtgtggcgactaatacgaagccgatgccacagttaaaagtgcgccacatttcggtatcggctagcgcgccttcgctctgtagccattggaacactggcggttgtgtccacgcgttggcatcaatgcgcaaacccaggttgggtggaatcacgcggatgatgttctctgtcaagccgccgccggtgatgtgggccattgcgtggattgcgtcgctgtgggtgtgtagaagtttcagtattggtttgacgtataacgtggtgggcgccattaatgtgtcgattaggcgggttccgtggatatccaggtcggcaggtgatccggcacgctcatagatacggcggatcaatgaatagccatttgagtgtggacctgaggaggcaatgccgatgaggacatcgccttcgcgtacttggctgccatccaggagttgagatttttcgacagcagcgacacagaagcctgctagatcgtattctccgggtggatacatgtctggcatttcggcggtttcaccgccgatcagtgcgcagccggattgctcgcagcctagcgcgataccgctgatgactgccgtggcggtgtctatatccagtttgccggttgcaaagtagtccaggaagaacaagggttcggcgccctgtaccaggacgtcgttaacgcacatcgccactaaatcaattccgatcgtattgtgtcggttcagttgctgtgccaacttcaatttggtgccaactccgtccgttccggagaccaacacaggttctttgtatttgcctgctaggttgaacaatgcaccaaagccgcccagtccactcatgacctcgggccggaagctgcgtttcaccaacggcttgatccgttcgacaagtgtattaccagcgtcgatgtcgactccggcatcgcgataggtcagtggtgtcgtgctgggggaggttagagttgtcacggggaggcggcagcttgatcggaaatccttggtaatgttaacaggctgcattggcggcaatgccttatttcgggcaacaatctctattctgcatatcccatgccatggaattatcaatgcgttaccgtttttttctgttcattgctttgtgtgctgtgctgccggtcgttccggttgtggcgcaacgtgccccgcatactcagagcgatgtggccaaggagcaaggtatttatgaggccgaggtgtcggtgaatagtcagggtgacagtgaccggaaagctggtattgcgcgtgcgctgtccattgtgctgggcaaggtgacgggtgatcgcagtcgcaatgcaaagttacgtcctgaagtgtctcaagcgttgcgcgatgcggctgttttggtcgatagctatgactaccgtcaagatcaagggagctcgcctggaggtgcgccgacgtttcgtaccatgctgacggtgcgcttccggccagatgaggtcaatgctctggctggtgcgctggcgttgccggtatggccgcagcctagacccaagcccgtgttgtggctagccattgatgatggtagtggtccgcgtttggttggggtgcagcagtccagggcggtacgcagtgtgctcgatcgcgcaatcgagcgtggctacaggttgggtttgccggctggaaggtcggaggagcaagccttggtgactgccatttggcggcgtgatgtgagtgcggtggtgagcgcttcggcccgctacacatctgcgatgcagctggtcggtaaattgtatcgttcagggaatggttgggctgcggattggatttttgtggatggtggtgagcaggtggcgagttggtccagcggcgatgcggatgcgttgcgtgtgatggccgatggcgctgatggtgttgcggatgctttggtcaagcgctatgccaaggtgccgttaacggggacaccgggggtctatcgagttggaattaatggtatccgtagtgctgacgattacttgcgtgtgtctgctgcattgcagagggttcctgtggtacgcagcattattcctgtgaaggcgagtgctgaacgtctggaggtgtatttggatttgatgacgggtatcaccggtctgaatcgcatgttgggtggcgatagtgcgttgcagccggttgctgcagccacgttggagtcgccacagagcgaaggtgagcttgtggagtatgttctgaaatgatgttttcgcctgaagttgaaattgcccggtttctgcgtcgtttgaagtggtatgtgttggttgggggcgtcctgtggatggcgtggttgctcactcccgtgctgattccatttgtgctgtcggttttcctggggtggttggcagatccgttggtgaaaagggttgaatgggcgggtgtttcacgtgctatggctgtctgtttcgtattttttctagtcgtgctgttgctgttgctggtgctgatgatttttgtgcctctgattgagcgtcaagtggtgacgttgattaatacgtttccacagatgcatgattgggtggtgaataccgtgattccctgggtcgagcaaaaaacagggtcacagttgaggacctggttagatccagagcaaatgatccaatggatgcacagtaattgggagcaggcggggggcgtggccagggggcttttcggttatgtgtcgcgctctggtttcgtcatggtgacgtgggtcatcaacttagcgctgttgccaattttgagcttctattttttgcgggactgggataagtgggtcgagcgcgttgcggctgcgattccgcgcgcctatatcggtaccgtcagccgtttagtcgtagaggcaaatgaggtgcttggcgctttcatccgtggtcagttcctggtcatgctggctttaggcgcgatttatgctgttggtttgtcgttggtagggctgaagcttggtttgttgattggtttgattgccgggctgattagttttatcccgtatttaggtgcgatcactggcgtggtcctggcactcattgccgtcatcgtgcaggtgcatgggttggatctgcagttgttggttttggtgggtgttgtctttggggttggccagcttctggagagttatgtgctgactccgcggattgttggcgacaaaatcggtttgcatcctgtggcagtcattttttcggtgatggctggtggtcagttgttcggtttcgtgggtatgttactggcgctgcctgtcgctgctgtggtgaatgtgctgttgcgttatgcgcatggccgttatatcgaaagtgagttttataaaggtcagtatttggcggtcgcgttgcatgggtgtaaaagcgatgagaactgtgatggtaaaaaggacgtggtgtgagtgtttcgcagcttccgctggccttgcgttattcttcagatcagcgttttgaaacctatctgcacgctccctctggcttgattgcgcaactgcgtgctgtggtcgatcagtgctcacgggattggatctatcttgtgggtgcttccgggagtggtaagacgcatttggcattggcgttgtgtgcggctgccgagcaggtcgggcagtcagtggcttacttgccgctacaggttgccgtagggcgcttacgcgatgcgttggaagcgctggaaggctgtctcttggtcgtgttggatggtttgcaggcgatcgttgggatgcgtgaggacgagattgcgttattcgactttcataatcgcgcgcgtgcggctggtattacgttgttgtatacggcccgcgctatccctgatgggcttggcttgacgttgccggatttgcgttcacgtgtggcgcagtgcatccgtattgcgttgcctacgctggatgatgtcggccgtgcatccgtgttgcgtgaacgtgcgcaacgtcgcgggctgatgttggatgaggctgcaattgagtggctgttgagtcgcggtgatcgtgatttaggcagtttggtgatgttgctggaaaggcttgatcgtgaatcgctagccacaaagcggcgcgtcaccattccgttcttgcgtcatgtgcttgcggagggtgggggttgaggtgtcttgctgttgggaggttaggagcttcttaatccaaccaatgaagccagtgtgagggattcatgttgcgattaaagcgctaacgcgttgtgggtggtgtgtcagcgaaggtcaggccagtggagtatcggagtgatccatacactttagtgctggaaaacgaagaaaatttcgtcgtttttttagaagcgtgctgctggtgatcttagccatgtatctagtgcgtgcagacgctgcggcgtaccaacgtcggtccattggccgcggtggtgggtgccgtggatgcggccgcgtcgcatggttgcacgcaacagtggcgcaagcttgaagcgcggtggttgtgcatgtgtgtcgggcgtatcgccgatgatgttccgccagtcggccagcagttgtgatctgtagatgccaagtccggcaaaagtcaatgtaggaattccaggggtgcggtcgagtacgctgctgtctggttgtaatacaaagtcgccttgtgggtgatactcagggttgttgaccagcatgagatgcgcatcgcctactggttccgtcggtaggcgtgtgaggtcggcatcagtccagatgtcgccgttgattgcgaggaatggcgcgttgcccagcagtggtagcgcatgtagcatgccgccgccagtttccagtggtagggagccttcgttgctgtagaacaagcgtaagccgaaacgttgaccgtctccgaggatctccgggaattgctcgcccagccaggcggtgttgatcacaacttcactgatgcccaacgcggcgagtttgcgcaggttccagacgatcaatggttcaccgccagcacataagagtggctttggggtgtggtttgtgagtggacgcatgcgctgaccgatgcctgcggcaaagatcagtgctttcatgttgactccgtgatcattcgtgctgtcagtgctggtttgatgcggtgctcaatcagttcggccaatggtgcgagtgttgggtggcgtggcagtatttcttcaagatagctgataaagcgcggtacgttttctaaataccagcacttaccgtcacggtaatggagtcgggcgaagatacctagattttttaggtgtcgttgtacgcccatccagtctgcatcgcgtagaaagtgcgggagtgtttgtactggaattttggctgcgttagcgcgtgcgtggtagcgcgtcagccagcgatccacacgtgccagtggccagctcaccgaggtatctttgaacaggctcactggatcgtaggcgactgggccgactgtacagtcttggaaatctagcaccgtgactccatccgccgttagcatgaggttgcgtggcatgaaatcccgatgtacaagcacacgcggttgtgtcagtgcgttatccatcagttgctgttgtacttgcttcagtgcgtcgaggtctgtgcgattcagtgttaagttcaggtggcggtataggaaccagtcttcgaacaagctggcgtcgcgttctagtagtgctgtgttgaaccggggaaggtcgtttggcggaacaatgcactgcaatgcgatcagttggtccagtgcggcgtcgaatagggcatcggcgttgtcggcgtccaggcgttgggccagcgttggtatgccgaggtcctccagcagtaagaagccagcttcaaggtcttgtgccagtatgtgtgggacacgcacgccgccgctggtgagtagtgcatgtatacgtagccattggtgtagattttctagatgtggtggggcgtccatcagaatacggttaaggccgttgctagtgctgcgccaataactgcggaatccggcgtcactggaagcacgttgtagcgttgctgtcgagtctgcgagggtggtacggatccattgcaggcgttgtgtcgcacgtgtggtatcagagaagtcggatgaggtcatacgcagcgtgaaagaatggccgacgagtaatgagtcagtgttagatagtaaggtgcctttgtaggcttgctccgaatttttcattgaatacttgcggaagtattcaaaagtgggacagcgttaagtcacttggccgcttgcctgggggagtatcaggcaggtgcagtttatgtcgatcatcaatgaggtgtgttgggggggggcatgttatccgcccattgcatgatattttgttgatcttatttcctttttatttaatttgatcaactcttcgtgtgcttcgccaaggaatgttttggtgcgacagagagtgacagggcattgctgtgttgcggttccaggttgttttgcatggattaggatttttcctacattactctgtggtttttactgaaagtataagaggtggtttcgaggtattttttcctcagccagtaatgaatactggatcggctggtagaaatactggtacgaactttaaataaaatactcaagtcactcttaaagtaaggggcgttgccatgaaatctttcgctatgagattgaagtctttgttgttgttgtttgtccttgctttcacggtacatgcggctaacaaggtcgatgtcaacactgcttcagcggaagaaatggatagggtattggtgaatattggcccctctaaggcctcggccatcgtcaagtaccgtgaggaaaatggtcccttcaaaagtgttgaggaattggcgctagtcaaaggaatcggaatgaagacggttgaacggaatcgtgacctgattgaaattggcaccaggatggcacctgctaaacatgccaagggaacggagctgaagtcggtgggaaagcggtaagaggcgcggaagggatacggtacgatgcatgatgcatggccgttacctttctaggcaagatgcctggaagaggcaagatgccgacatggaatgtaacgtcgtccggtggttgtacttggatgtgctgccgggcgttttttcggaagagtcagacagtggatgtttttgtcaggctaatcatgttgggacttgtcgttactgtcatgttcgtgaggtcatcccctactgaaatagatgttatccagtagatggatgctctccattcgttggttgtccaaggtgtggagacggataccatcggcaacccatctacctaacatgtccgtattgatttcaagcagatatgagatgtagcaacgctgtgattggctgttccttgagaagtcaagatcaatgagcgatcctcagatgggactacaaaagcgtgtatatgaaagcgtgtattggttcagatcgacaaggcaatctttcctttggtgcgtgtttgcatagccaaatgttgcctaatgggttgcttggtgttgtaacagcactgtgatgtggatttcctgagaagttgatgcgattgagtaggcacgcgattaacacgtcatcctgatatgttgttccatttgcacttggatcggggtgtgctttgtatctcaagtgatcacgggccgatatgtaggtctagtagtgccattattacgactgttgaaggttggatgccagccatagccagtatgtgactctgtccagcccgattcatgctgttgctggtttgtgtagcaagcgagtgaaggcaggactgtagtaagcggtgaatgcgtcattgttgtgttctagatagcgaaccgctaatccgagtgtgttggctagtgctaagccggcttcgcggcctagcgcgtttagagcggttgcccaggcatcggcgtgcattgaactgcttgcgatcatggtgaccagtgcaggtgcgtcagggataggggtgccttggtgagggtcgatagtgtgtgtgtagcgttgaccttcgtgttcgaagtggtgccagcggtccccagaggtggcgactgcaagtccatccagttgtaggatgcacggtggcagtgcattgtcatcttggtgtgtgagatccatttctaccaggacactccaaggggtgccgtcaggtttatgtccatagccatataactcgcctccaatgtctactaacgcatgttccacgcctttggcatgtagtgtggcggcgacggcgtccacgccatatcccttggcgattgctgataggtcaagttcggttccaccaggttgcagccaatgtccgtcagtggtgcgctccaggtgttgccagccgacgcgtgttgttgccagagtgattgcttcaggtgttggtatttgtgtgtggttgccgtcgtgggcgccgaagccccagagtctcaccaacggtccaacggttggatcaaatgcgccgttgctggtcattgcgatgtctagggcggtacgtagtactaagtcgaaatcgtttggtagggcatgccatgagcctgctggtgcgcggttgaaacgactaatgtgactgttcggctcccatgtgctcatttccgcgacaatctggtcgagtcgtgcttggattgcagtgtgtagtgggtgtaggtcgagtcgtcgtggtgccgctagtttcacgctccaggtggtgcccatggtgtagccgtccagggtggcaaggtcgaggttggatgtgttcatgcgggtgtgacagcaggtgctaagacggttgttatagaagcgatgggtctgtcatggcgaaggggtcactgtggtagcacttctagggtggccatgtatttaagcctacgctgcttggcgggtgacaggctgaccttggtgtcttcggtggtgatgttcagtaaatacatcccggcttcgggccaaatgacagagaaacgtccttgggtatcggtggtcactttgatttcatcctgtgagttacggtaccgagttgcgccgcggatgatgtgcacttccagtccagtggcttcttttccgtcaatgcgtagtgaaaattgtgctgtttcgccagcgagcaggtcgtttggatgggtgatggggactaattccagaccgtggccgctgggttcgagtgcggtccggttcggattcccattggtgacaaaggtttctgtcctggtaagggattgtgtgacgttaaggtctggggtgtttttgggtacttctgcggcgaagcgtgtggcatctccacgccagcgtttgagttggccattctcggtccaggtgacagatagcccatcgttcacgacactgagtcggtaggtgccctgttgacttagtatgacatcgaatatgctacggtacttgctgctggttgggttctgtggtcgctcatggctaccgtttggtgtggtgatgatcagggtgtccagggatagcggcgcgtggttgaaatagaacagatcgtttgatattgctgcgtcaacggtgatccacggtgattggccggcaatgacggtctgtgaggggagcagccaggctttgtgtgcctgtgcagtgaagggaagagccgccagtatggtgctcaataggaggaaaagtttcatatcagttccttgttacggagaggctcaatgaggtttgggtttcgaggtggcagccaaggtgacggtgccgagttcactcttacccagtgcttgacccgtctgtatggttgtgactggccaggtaaatggaatctttagtagttcgcgcccgccgacttcacgtgtggcttcgacaaccagggtgtactttcctggtggtaggtgtttgagttgtttttgctcgtctaaggacagggtgtaccgcccagcgggccgagtgggtccggtgacaccgtctataggcagttctacggtacggccgctcttgcgccaccactggcgcagttctggtaaccatttggtgccgtgtgttttgtcgccgttacgttggtaccagatggccaggttatgtgcgactttctgatcggcatcttcaatccagattgcaacgtaggggcggtgatattcggcaacgctgagtgtgggtatttcgatggtgatgttcagtgtggtggcgtaggtcggcatggacagcagaccgctgagggcaatcgtcagggtaatgcgcatggaatgtttccgtggaagttcaagttcagtgaatcaggaggagcgcgatcagtagcggcacgatcaaaccaaagccgacgagcggccacgtcatgcgccgttggcgggagtgtaggtggagcaggcataggccggttaggcagaacaccaggcaggcgactgccagcaggtcaatgaaccaggcccaggctggacctgtgttacggcctttgtggaggtcattgaagtaggcgatccagccacggtcggtatgttcgtactccagtacgccattggtgcgattcaggctgagccaggcatcggtgccggggccggtgagcgatagatagatctcatcgggcgaccattctgcgttgcgcccggccagtgtttggccagtgtatgtgctgagccacgcggcgactgcaggtgggagcggcgcattgccggtttcgggtgtggtgagtgctgcgtgcagtgtcggcggtagtgttgtggtgcgatgtattacgtttggtgtggtctcaatgtgtgtggcgtggttcagggtcaatcctgtgattgcgaaaaggaggatgccgaccaggcaggttgctgagctgatccagtgccattggtgcaatgtgcgcagccagaggttgcggcgttgtcgacgcttggttgcgtcggcgtcggcgtcggcggaggaggatgtggttggcattagatgtgttcaggtttccgaccattctcgcagcaagttgtgatagatgttggtgagtcgcaggatcgtgttgtggtcggtgttggaggcagtcagtgattgtatcgcggtgtccagctcaagtaattgatggcggtgtgtggcttgacgcaccaggctttgcacccaaaaaaaagaggcgatgcgcatgccgcgggtgaccggtgcgacccggtgcaagctggtggatgggtaaataatcaggtcgccggctggcaatttgacttcatgctcgccgtaggtatcagcgatgatcagttcaccgccctcgtattcgtccgggtcgttgagaaataaggtgcaggagatgtcgctgcgtaggctggctggagtatggccgggggcgatcggaagggacatcactgcgccatcaacgtgaaatccgtattggtggttttcttggtagcagttgaaacgtggtggcagtgtgcgtagcggtaatgttgcagcaaagtacagtgggctgcgtgccagtgcatcaaggatctcgttcccgagttcttggcgcagtggtgatgtttccggtagctgtaggttatgtttaacctgggccccttggggaccgacggtctcgcgtccgtcggtccaattggctgcagctaagcgttcctgcattgaggtggcttgggtgcgactgaggatggtggggatgtgtaaaagcatcgtgagttttttgagctaggtgttcatgccgcgctcgtgctgcttagaggtggaagtttgctgtcagtagaaacgcacgtggggtccctggtgcataccgatagccactcttgttaatcgctgcgacgtagtttttatctaacaagttgtagctgttcagccgtagatccaggtttttgttcaggcggtagctaagtaccatgtctaggacccagtagctctcgatataggttggcgtcccgatcgcggttttactgtcacgtttcatttctccgacgtagcgtgcgccaccgccgatggtcaggccaaatgggagggtgtatgtgctccaggcggtgaatgcttgactgggggtgtaggcaagtgtatgtgaaccatcggccgagacggcgggtccctgtttgactttggcgtccattgtagtgaaccctgccgacatcgaccaggcatcggtaatttggccgattgcgctgagttcaacgccgcgcacgcgtttcttaccattttggtaatactgtaggtcgatggggtcttgcacgatgtcgtttttgacctgggtgttgtatatggcggcggtcagttgcaggccttcttgagacgagttccacttcacacctgcttctgcggtgcgtgcggcttgcggttggtacttcgggttattggcatcctggggtttggcactgagatctagtgaggaacctccgggtggttgttgggacacggcgtagttgatgtagaggctgctgtgttcggtgggtttaaataatatccccgttttccagccgaacagcgtcccggacgtgttgccattgaaccgattgagtgtgatgggtgttgtgttgcagtagatgcggctacgtactgggtcgcagagcagtgccgcatagtcggtgttgtagcggtcccagcgcaggcctccgttgagctgccaatgctgattgagcttaagtgtatcgaacaggtaaaacgcggtggtatcagtacgtccgttcgcataggcgccattggctgcccagtgcagcccgctgacgtttgggtccggatggtacaggttggctgcaggccagcgaccgctgctgctgataccgtagccttgcatccgttcacgggtcagttccataccagtggcgatgttgtgttcgatcgggccggttttcagggtcagattaaggttggtttggttggtcaaaatcgtgttggtttgattcttgaatattggtatttcacggttcattgtccaggtcgaaggatcggctaggtccggtgttattaagttctctacgttgccacggtaggaggtcagtaggtaactctgttcgttgcgaccccagcgcaaggtattttgcagtttcgttttgtcattgatatcgtgctcaatgcgtacggttgtcatggacgatttcacatgttcgaaatctgatccggtcccatagaagtttttgctgtccacgcgcggtgcggtgctgatttgtgtccgtgtgctgtctggggtgctgtagccgggtaagccaatggtgagcacgccgccgtctggaatgttgttctggttgatatattgcaaattgacgaatacgcgggtgctggttcccaggccaaatgctgctgatggggccagaccccagcgcttgtttttgacattgttgcgtccgggaaccccgctgtcttgtcccatgatgtttaagcggaatgccgaatcagggctaacaatgagattaaggtcgctagtgatgcggcgttgcgaagctgtgccataggagatgcttgcagtgttggcattgtgtagaaagggctgtttggtgatcaggttaatcgcgccggtcggcgaagtacgtccgtagtcgggtccagacgggcctttggtgacttctatttgttccaggttgaagacgtcccgggtgattgagccaaggtcacggatgccatcgacatagatgctgctagaactgtcgaagccgcgcatatagacgctgtcacctcttgaggtggtcccgttttcgccgacgtagaaggtgcctacgcccgggctgttgcgtaatgcttcggtgagtgaggtggcgccttgttcgttgaacagagctttgccaatgatgttaatggtctgggtggtgtcgatcagtggttgggtgtacttgccataggtaggtttgtctgcggaatagcgtttgagttgttcagcttgtacgtcaattttgtcgagcgtggtggtttggatcgcttgtgcctgagcgacaaatgagaaagaggacagtagggcggccgcggtgaggtggcggctgctggccgttgctgtgatgaggtgtttgcgactcttaatgaatggcattggaggtctcagtgagccatgatcggtgctgattgagttgtggcagcacatgacgatcatttatctgtagacaggaaacccggaagccggggccgacgggggacagggggatgtaatgtcaccttcacagtgactttattttaaaggagaatgattttcaatagctattgatactctttaactctatgaagagagagactaaataaatgaataaaaatttctttgaatgatgtcaggtaatcaaaatggttaaaaaaatttttctgggtgttctaatgtgattttttgttaacagtaagttttctatgaatcttgatacatcatcgttgcaagcatgctgttggctcctgacaatgatgggatttaagtcttcttgttcatgagtttcctaatgatgatgagtttcgcgcaaaggtgccgatccctctatatagtgtttgctcttggttgtttctttgtatgttccatcccggctttggctcaggtgacatcgtctgaattggaggttgctgagcaggcgattcagcgtgctactcaggccaatgcggatgaatacgcaccgaacctgatcaatcaagcacgtcaattattgattcaagctcagcgcgcgctgttggatcgtgatcagcgtaaacaggggccactgattgcacagcgtgccgctgcggatgcagatttggcgaccgcacgcagtcaagtagctatgttccaggctcagctggagcagcgtagggctgaggtcatgcagcttcagaatactttaggcaccacggaggaaaaataatgatgttgatcaaaccgacgttgttgtcttgcgccctggtcttggtgttgattcctgtcgtcgcgttggctgccaaagttgatccggaggttgatgcgtttaatgctcgcttgaatgcgctacgtgctaactctgaagtcgctgatgccactcgttacgagcagttgttggcacaacaggcagtggcggcattggcggatgccaggcgtagggagcgtgatcagttgctttacttggctgatcggcgtgtggagattgctgaaaccacggtgcgcattgcattgcttcggcgtcaactggatcagttggcgggtacgcgtaatgatctgcttattgaagaaagccgccgggaggctgcccgtgctcgtcatgaggccgaacagttgcgtatccagtcgcaaatccaagcggaggaggttgagcgtgcgcgtcatactgctgaggctgaggcgatagcccgccaaaatgctgagcaggctcttagcagtgttgctgaaaagcagcaggccaatctcagtgttgctcagcagaaggctgcgcagttagctcgcgaggaggcggaattactttccggtgctaagttgccgccttcacgtttcgatgagcgtatcgagatttttactttgggtacggaggcttacggcggtggtaagaagagattttcatcgagtgcgcgtgctcaaattcaggcactggcgcagtacttgaaaatcgttaaaagaagcggtgtggagattgttggttatggcggtgatgcggtggtggcccataagcgtgctgaagtcttgcttgatgctttggttgctgcgggtgtccccgctaatcgattcaaaatcagtaacggtaacggtaacgtcaacaccaaagcggctgaagttatggtgctgccctgaatatgcagggtagggtgaagttcatatggactgtttatatggactgtttatatggaatacactcgtcagcgcggtcttgttaatgcactatcgctctatccagagagcatgtgtggcgtttggtgcgtagttggccagttgtactgcaagaatgtgggaggtccagtccgatatgcagcaagagtgtgaatcgtaatgaggagcgtatcgttcagatttttcctgtgacaggtcaatcttgactgttcgtggcatccctcattctgaagcagcgccttctgattctctcatttctagggcgtttttgttttgtagcagaaggagtctaaatgatgtttgaagcgcaatcacagtcagaaatcgatgctttaatcaaggctagtcaagaatttaaagagttatatcagcgccataagttgctcgataaaaaatgcatggatgccgagttaggggttcttccgatcagtgatgtgaccttgagccagatgaaacgagagaagctgttcgcgaagatgaaactcatcaggctatatgagcaacgcccgcactgaattttctaattttaatgacaatgtctcttgcagcgagcggtgagttatttccctgccgctcgttgcttatacttactgctctgtttcgatgaataatgtgcgaccctcctgtaagttcattgattgagagtacatggtcattcattcttccgtacttgaattgattggtaatacgccgattgtcaaggcgcagcgccttgacactggtctctgtgatttatttttgaagcttgaaagcgctaatcctggtggttcaatcaaggatcgtgtgggcttgtcgatgattgaggcggctgagtgccgtggtcatatcaagccgggtgctacgttggttgatggggctgccagcagtaccagtatgggcttggcttttgtagctcggcagaaggggtatcgcctgatccttgttgtaccggacaacatggcttgggaaaagatttctaatcttaaggcgatgggggcggaagtgatattgacccgctcagatgtcagcaagggtcatccagagcactaccaagatttggctgaaaaactggcagccgagacaccaggagcctacttcattaatcagtttggaaatgcggacaatccagctgcgcatgagttcggtactggtccggagattctgaagcagatgggcgatcatgtggatgcggttgtattaggttgcgatagtgctggcaccatcacaggcttgtcgcgggcattcgactcagttgcttctgatgtcgaattgattttggccgatccggttggttcgattcttacccagtacatcaatgagggaacatgcagtgataagtctggtacttggttggtggaagggattggaagtgattgtttgcctccgatttccgacttcaggcggatcaaaaaaacgtatgccatcagtgatgcggagagctttcacactgcacgtgagttgttgagtaaagaggggattctgggaggttcttcaacaggtactctgttggctgcggcattgaaatactgccgtgagcagattgagcgcaagcgtgtattggtgtttgtttgcgacacgggaaacaagtatttgttaaatatgtataacgacgattggatgttggataacggttttttgaaaaggccacattatggtgatttgcgtgatctgatcctgcatccttacagtcagcgtcatactgttgtggttgatcccaatgatttgctgactgtggcttaccagcgtatgaagcgatacggtgtttcacagttgccagtgattgaggacggacagctggtcggtatccttgatgaaagcgatgtgctgttacatgtctatggtgatgagactcggttttgtgaccctgtttctaccgcgatggtcagtaagcttcaccgattggatgtgaagtcgccgattgaggggttactccctgtgtttgagcgaggccaagtggctatagtgatggaagatgctcagtttttgggcctgattacacgcattgatttattgaattacctgcgtcgtcgtatgcaatgacggttagatacctttgcgctatagtggctcgctggctgcctgagttttagttttactgaagcacaatattattcacgactattcggtcaggatttagagctttaactccagtagtcatcaagttgctggttggtgtgctacgggcattgaacagttttgtggtgttgccgctgtgtgttgagcgcatgctgtgtagtcgttggtgtatgtgcaatgagaaatctgaagtatccgattgttaggcggagagaacggtatatctcaagggtttcgtatcggatatttaattttcgtggaattatttcagttcttgaagggttatatcaattactatttatttattggttttatcttgataaatgacatggtgctttagggcgcttagtgatccaagacgagattaagtatgtcttctgttcttgaaacatgattgattacagggtgatgagcactgtaagtagggtattattctgtggtagctccgtaaacaaacggcgatggtatcagtagtgattaagtactgttgtatttgcttggtattttcccagacaacaaggtgctaaggtgtaatgcgtcgaatgtttggagcgtgttgacagtgcaacagttcacgcgtgtgctatatctcactcatcatttgataaatatttttagcctcatgtcattttcttcccgacagatgaataactgatgtcagagttgatttcttatgcgcaaaattttgaagacatcatgctctggcgtgcttttaagcacattgaccgaggatgctatatcgatattggagcgtacagtccagatattgattcggtgagcaaattgttctacgagcgtggctggcgtggtatacatatcgagcctaatcaagagtgtgctgacgcgttgcgtatgcgtcggccagatgagctggtacttcaagttgcagtgagtgacttggcaggcgtgctgccgttctttgatattgccgatgttggcttgagtactaccgaacctgatattgctgatactcatcgagcccatggatttgtggtgcgtgatgtcagtgttgttgcgataaccttggatgcggtgttggagcacctgcgtgggcgtgaagtccattggctgaaaattgatgtggaaggcagtgagtctcgagtgctacgcagttgggttgcttctccagtgcggccttgggtagtggtggtcgaggcgactcgacccatgacggttgagccgacgcatacgcagtgggaggctgctgttctgggtaaaggttatgtgttcgcttacttcgatgggttgaatcgattctacgtgagtgatcgtcatcctgagttgctggctgggtttgcgtgtcctcccaatgtgtttgatggttttagattggaaaatagctggtgtgcggtgggcgtgcgtcaatgggatgagtgtcagaagagcttgataaaaagtcagtctgatgcgcttgcggcacacgcggaagtcgaggcattgaaggtgtccgaggtggtgttgcgtcaggctattgaagcgtatcgtgcggatgcgattgctgcttatgtagaagtcaagacgttgaatgcatccaaagcctgtttgcagcaggccattgatgtgcatcgtacgacatcagagcatcttattcgggagatcgattcgctgcgtgccatgctggatgatatccgtcgcagccattcttggcatgtgacgcgtccgctgcgagttttttctaggattgtcagattactatgtcgttcacccaggcacgcgatacgtgagtgcctcatcctggcaatgcgcccattgttacgccgtccaggcattagagcgttattaaatggcgtagtaaagcgtgtccctgtattgcatcggcgcttgcgttcactagctgaacaagagggtttggtggcacctccgttgagcactgctgatgtgctggtatccgtgcccgtgccgcatgtgctgggtcaggcgcatcgctccttggcatgcgatgaaaaacagggtatgcatttattgtcaagtcgtggacgtgagatttacgcacgcatgataggtcagataaacaagggagaatgattgatgcgtatcgtcatggatctgcagggtgcgcagtctgaaggaagccgccatcgtggcattggtcgctacaccttgtcgttagccatggctgcagcacgtaatcatcgtggccacgatattcatctcatccttaatggcgcttttgcagatcaaatcccggtgatccgccaggcttttgagggattgttgccacagaccaatatccatgtgttccatgtgcctttgccaatcaaagagatggaagaggcaaaggcgcgtgctgagcaaatcagagaggcggcgattgccgcattagctcctgatgtggtgcacgtctcaagtatgttcgaaggttatggagacaatgctgtgaccagcgttgggcagttcgtccagataccgacggtggtgacgttctacgacatgatcccgtggattcaccgcaatatctacttggatccggcacctgcttatcgttatcgtaagtactacgagcgtaaactcactcagctacgttgcgctgacgcattagtcgggatttcagagagttcctgtgctgaggctgttaacgtgatgcgctacgatgccaagcgggtgttcaatatttccgcggcgtgcgattcaatcttcgtatcactgtcccgtcactcccctgaattacagatggttttgaagaaatttgggttggatggcaattttattctttataccggtggttctgacgagcgcaaaaatctacagcgtcttattgatgcttacgcgcgtctggagcatggccagcgcacgcgctgtaggctggtactggctggacgaatgcctgatcactgtgtcaaacagctgttggagcgtgctgctgcggtgggtctgacatcaggagaagtcattttcaccggttatatttccgaccatgatttggttgctctctacaatctgtgttgctttttcatctttccctcctggcatgaggggtttggtcttccagtactggaagcgatgtcctgtggtgctgcggtacttgcctcgggtgtgtccagtattcccgagattgtccattaccccgatgcgttttttgatccattcgacgtagattctatccgtgaccgcatggcgcattttcttgatcacgatgctgatttggaggagctgcgtaggtattgcttggaacgcgctcaggcattctcttgggatgcagtggcactgcgttttcttaaagtgtgcgaacaggtggacaagtatgctgtgtgcccgcagattccagagcacgatgtcttgctacgttcgcttgaacatcgcttggttgaactgggtggttgtgaaaccagcattgatgtgcttgctttggctgatgcaattgatcgatcggtgcctcctccagttcctaaaatcatggttgacgtgacccaactggcgttacttgattccagaacgggtattcaacgtgtcacgcgtgcgattgtttgggaatggcaacgtcagcctcctgaaggttatgtcatccagttggtgcgaatggatcgcgaatcatgcacctatgtgtgcgccaacgcctatgctgctgagttggctggcatcggtacggtgattgaggacacgccgctggtctgtcattccggtgatgtatttcttgggcttgatttggtgaatgactgtatcgcgttgttgccggattggtttcagtacttgcgtaatgcgggcgtccggatcgcattcataatttacgacattctgcccgtgcgttatcccaattggtggccaggtcaaggtggacttcatcatgagcgttggttgcgcgatgtggtggggggggctgaggtgttgctttgcatctcccgagcgacggctgatgatgtactagcgtggatggacgaacagcaattgcagaagcgcccggatgtacgctggttccacctcggagctgatattcagagtagcttgccaagccagggcatgttggaacatgagcacagcgtgcttgagcaactgaatggccgggtgagttttcttatggtgggcaccttagaaccgcgtaagggctatgctcagatcctgcgtgcttttgagcaattgtgggccgcagaccatgatgtgatgctggtgattgtcggtaagatcggatggttggtagatgcactgtgcgaggaattaaagtctcattctgagttgaatcgccgtttgttctggttcgttggtgccagtgatgaactgttgggacgactgtattcggcgtgtagttgcttgattgctgcatctgaaggagaagggtttggattaccactgattgaggcggcgcagcatcagttgccggtgattgcacgtgatattcccgttttccgggaagtggcgggtgaatatgcggcttatttttcaggaaccgcacccgagcaggcgcgtgatgcgattctggattggattgcgttatatcgggagcagcgacatcagcgcagtgatgtgatgtcttggctgacttggcgggagagtgcagctgatttggctgctgtgttgtttgaagagaccgcaagccccgttacgcgcgagaatttcgtcaaagacagagtgggggagatgtgagtggatgtgtttataattcttttttgagatggattcatcattaataaaatgatgtttatttctttttcaatcatgttttgaagaaatactaatgtgtaataaaagcgcggtcattacgggtattacaggacaggatggagcttatttagcgcagttgcttctcgaaatgggttatgtggtttatggtacgtatcgccgttctagctcattgaacttctggcgtattaatgaacttgggattgcacagcatcccaagttacatctggtcgaatatgatttgaccgatctctcttcgagtgtgcgactgctcgaattagccgctcctaaggaggtctataatcttgccgcacagagctttgttggcgtctcttttgaccagccattgaccacgacggacattaccggagtgggtgcggttaacctgttggaagccattcggattgttaatcctaagattcgcttctatcaggcatcgacttctgagatgtttggaaaagtccagcagactccgcagattgaggaaacacctttctatccgcgtagcccatacggtattgccaagttgtacgctcattggatgacggttaattatcgtgagtcgtacggtatctttgctgctagtggtattttgtttaatcacgaatcgccgttgcgagcgcgtgattttgtcactcgtaaaatcactcatgcgattgccatgattaaattagggaagctagacgtattgaagcttggtaatttggatgccaaacgtgattggggttttgcgaaggaatatgttgacggaatgtggcgtatgcttcaggctgatgagccagatactttcgtgctggcaaccaaccgaactgaaactgtgcgtgatttcgtcagcttggctgccagtgccgttgatatccagttggagtggaagggacaagccgaacgggaatgtggtgttgatgttgcatcgggaaaaactttagtcacaatcaatcctaagttttatcggccggcggaggtggatttgttgatcggtaatccggccaaagctagaacgaagctgggttgggaaccaaagaccacacttgaggagctttgccacatgatgatggaagcagatgtgcgccgcagcgaacgcgatttcccattctaatgactctgtcgtctggtaagcgcgttctattgacaggtagcagcggttttaccggtcgatatatgctggacgaacttcttcgccatggttacgaagtgattgcccttggtaagtctctcccggagacacaagatgattcggtgcgttggttgcaagctgatctgtgtgatctcgacgcgcttacccggagtgtggctgatgtgcgtccggatgttgtgattcatctggctgcgctggcttttgttgcacatggtagtgcaaacgatttctaccacgtcaatgtgatcggcatgcgtaacctattaactgctttaacccacggcgatgcaacgccagagtgtgtgttgctggccagcagtgccaacgtatatggcaatgcatccgaaggggagttggacgagtctacgaagccagcaccaaccaacgattatgcagtcagcaaactgtctatggagtatgccgctagcttgtggcgtgagcgtttaccgttggtggttacccgaccgtttaattacacagggattgggcaggcagatacttttcttatccctaaaatcgtcgcgcatttttgccgtcgctcccagcatatcgaacttggcaatcttgatgtgcaacgtgattttagtgacgtgcgttcagtcgttcaggcatatcggcgtttgattgaaaccataaacgcggttggaaaaacaatcaacgtatgttctggtgttgcttattccctgcgtgatgtgattgatttttgcagagatattactggacatgccattgcggttcagatcaatccggcctttatgcgtaccaacgaggtgcggattctccgtggaaatcattctctgttgcggcaattgattggcccttggagttctcccccattgagagaaacattggaatggatgctcaaaactgctgtttgatggacgagtcgactgagaagtctatattccttggtcaatcaagtttggattttgaaatgttcttatggagtgcccatgtctggaaataacaacagagtgctagtcaccgggggggctggctttctgggatctcatctatgcgagaaattggttgcttccggtcacgatgtattatgtgttgacaatttttatacgggtagcaaggacagcgtgatcaacctgattggtcacccgaagtttgaattgatacgccatgatgttaccttcccactctatgttgaagttgaccgcatctacaatcttgcgtgtccggcatcgccagtgcattaccagcatgatccagtgcagacgacaaaaaccagtgtgcatggtgcgatcaacatgttagggctggccaagcgggtcaaggcacgtatccttcaggccagcaccagtgaagtgtacggtgatccagaaattcatccacaactcgaaacctattgggggcgtgtgaacccggtgggcatccgtagttgctatgacgaagggaagcgttgtgcggagacactgtttttcgattattggcgccagcacaagttagagatcaaggtcacgcgtatttttaatacctatggtccgcgcatgcatcccaatgatggtcgggtggtgagtaacttcattgtgcaggcactgcgtggtgagccaatcaccatctacggggatggtacccaaacgcgcagcttctgctacgtcgatgatctgattgatggcatgttgcgaatgatggagagtcccaaggattttaatggaccggtaaacatcggtaaccccactgagtttacgatgctgcagctggctgaaatggtccttaaattggtgggtagtatttcaaaaatcgtatttcagccgctgcccttggatgatccgaaacagcgtcagccggatatcactttggctaaatctcaacttggttgggaacctaaggtctcgcttgaggatggcctcagggaaaccattgcttatttccgcaagcgtctttagcaatgtctgcttcagtgcctccgcttattattgtgatacctgtttttgaagatatcgaagcttcaagccagttattccaggaacttgcaaaaaatcaggggactgatacctatatcgttgctgttgacgatggctccatacgccaaccgcttcatccggaagcgatcactgctgctggattgcagggagtcgtgattaagttgcgccgcaatgttggtcaccagcgcgcaattgcgattggcttgagctatgtggttgagcatttcggtgacacgcattacgtggtcgtcatggattctgatggtgaggatactccaggaagtatttctgaattgctgggaaatctggattcaccacagattgatgtagtggttgccactcgtaagagtcgggtggaaactctcaagttccgcgtcttttatgtgatctacaaatacttgttttcgttgcttagcgggcgaaaaatcggttttggtaatttcatggcagccaaaatgtcggcggtgcgcaggcttgttgcaatgcaggagttgtggattcacgtagcagcctgcgtgctcaattctaagctgcgtgtttcgagctatgctcttgatcggggcatacgttacgcgggacgtagcaagatgaattttgttagtttggtgctgcatggcttccgtgcattgatggtttttgctgaagatgttttggtacgggttggtattgcctgcactgtgatcgctagcttttcgatccttggtggcgtattggcatttctgttgaagatgtttggttatgcgacaccaggttggttttctctcgttaacggtattctgctgcttgttttccttcaaactgcggcgttgactttacttcttctgatgatgtctggaatcatcagaagtagcggtgtatcgcctccagagacttacaagggttttattgaagagatcctgtatgcctgccggaagtaatagaaacagaattaatagcgcgctacgcgatcaacttcttcggtatctgcttaatgggctggtcgcaactgctgtccattacactattttgcgatttaatttggaagtactgggtctgcattcagcgggattggcaaatggtattgcggctatattcggaatcatcgtttcttttattggcaaccgtcattttgttttccgtatagtgcaagtaccgttggctaagcaggtattgctgtttatattgacgtatttttgcatcgctctaatacatacgtgcatcttgtatttttggactgacgtttacaatttgaactataccctgggttttctgatggctactgctatgcaagtcgtttttagctttttttctaataaattcatggttttcaaatgaatatgtttctcaaatcagctttggttacgtttgtttttattgtagtcatgctggctttttattatatacatattatttattttaaagtgaatgttgtcttctatgcgagcctgctagatggtgtgctggctgctgtattagtgggtttattattttgggtattccgttttttcaacaatttttcttcactggaaatagtacagttgctagtgatatggcttcttggagcatatttgtttgcaatttccattccaaccgttgttgatcgttcgctttctttctatatcctagaaaagttacagcaacgaggtggtggtattcgtgaagatgctttccaacagatatttcaagatgagtatatgcgggaacatcatttggtagaagttcgattgaccgagcagcttcagtcaggaacaatttatatccataatggctgcgttaagctaactgagcgtggtgagcggttagcttcattcagtcgtttctaccgtaaaaatcttttacccaagcatcgtttattgatggggaattatacggatacattgacagatcctttccgtgaaagtcggatgaaatcagattatcgttgtcaataaacataaggaataagaaatatcatatgattaaagtgactgctatttaccagcaagatcctccaccattccgtcaatggcatctgctgatgcctattatgttgcttgctttaggtttccttttaatactggaaacacatgttaattacttccgaggcgtgcctggtgatctaggggatgctcgcttcaatggcattattcttgagtatttttataaatgggtgagtggcggtaatgaatcactattgaatcctggatttttttatccgatgcctggtgcccttgcttttagcgataatcattggggaaccgcgtggatctattcgatctatcgcatcttagggtttgatcggtatgttgcttatgatctttggtatttaaccggctatcttctgaatttcgcatcaatgcactttgtgcttcggaaattgggctactctgttgttgctgctgcctggggagcgtttttctttactttcgggatgccaaccgttgcccatcatgtaggtcatgctcaattaacctactgtttcccagcgcctttggcgctgctgtgttggcagcgctttcgccagttgggtgctccactgtggttgggttggggggcgctagcagtggcattgcaattttatgtctctatttatctcgggtatttcttgtcattgttgttactcgcttggatagctgcgcagtgctggattgaaaggacatctcctttaacctggtttgctggtttcggtgcttgggtgaattcaaacaggagagatgctttatttcttttcctattactaggtttagtcgttgccagtctgttagttttaatgtatccctatattttatattcaaaattatatggtttctcgcgtgattcgcatgacatctcttcaatgttaccgcgtatccccagctattttatttctgatatctcgacgatatggcataccttcagtgaccgtgtaggcaagggtttgcctatgcgtcatgagcatcaaatgtttgtgggtctaggtgcgcttttgttggttgtactcgcgttaactctcaatagatcgccaatagtgaatgtttctattatatctttggccttattgatgttatttacattaaatattaaagatcaatcattctatctattatttgctgacttccctggagttaattcgattcgcgctgtatctcgtatcattctaatattaatgattccacttgcgattctgattgcctctggaatagatgcggcacgcttaaaaagccgaagatggatcatattagcagcttcgctgtgcgtagcgctcatgattgaaactattctaatgaaagggcagttttatgatattgctgaagcgaaaatacgtgccgcaaagctcgatcaaaagttgcctgcacatctgaatgcttctacagtgatttttgttcctgtcaatacatctgagccatcctttatgaccgagttggatggtatgttgcttgctcaagagcgtggattgaagactttgaacggatattctggaaattttcctaatggttattcaacgaatgatccgacccaaccggcgtgcttgcaggctgtttcgcgtatggaatcagcacggcgtttttatgctgagcaccttgggaaaaatttggatatgggtatttttaagtattttgttgcattggatactcctaattgttcagagagagagtggcgtgaaattccaaacgagcaaataaagcgtatcaagcttgggattatcaatgtaaaaaaactgtgtgatggacgctatgaagtcaacgtcaaggtagataatcaaagtgagtatcctttgcttgtattgcctaaggagcatccattgcggttatcttggcaggtccatcccaaggggactgctcctaaaactgatgcttgggtcccccgtgtcgattttcctcaaggggaggatattacagcaggtgctcagcgatatattcgcttcccgattaatgttgatgaaagtggtgatgtgatacttagtgtttctttggttttggaggggcgtgtttggttacataatcaaggattttctattgctcaaaagaaattaaatgagaaatataaataagtttggctttatctattagtaattatttctatttttattatgtggtttgctgtaaatgcagtggatgttgatccgtatctgtattcatttatgcattgggtatggatatttgggaattatccttaaatgtcctgaaatatggaaggaattgtataaccaacgttcgtagaagctaaagctgtcgctgtgtcaccattgcacgctgaaggatcaccgcagaaaaaaagccccgcgtgagcagggcttttttgataaatacaacaaccgtcagtttattttcttagaaatccataccgcccataccgcccataccgccaccagcagcaggtggggttggctcgtctttcttcggagcctcggcgaccattgcttctgtggtgatcatcaggccagcgattgaagcagcgttctggagtgctgaacgggtgaccttggtggggtccaggatgccaaggttgaccatatcgccgaattcgccagtagcggcgttgtagccaaaattgtccttgccttctttcaccttatttaagatgaccgatggctcttcaccggcgttggcaacaatttcgcgtaatggtgcctccatagcgcgcaatgcgatttgaatgccgtgtgtctggtcttcattggcacccttcagattgctgattgcagtgattgcacgtatcagggccacgccgccgcctggaatcactccttcttcaacggctgcacgcgttgcaagtaaagcatcatcaacacgtgctttcttttccttcatttccacttcggttgcagcaccgaccttgatgacggctacaccaccggcgagcttggctacacgttcctgcagtttttcgcggtcgtagtccgaggtggtttcctcgatctgggtcttgatttgcttgacgcgaccattgatcgcatcgttgtcaccgataccatcaataatggtggtgttttctttagagacgcgtactttcttggccttgccaaggtggctggtcgtggccttttccagagacagacctacttcttccgagatgacggtgccgcctgtcagcacagccatatcttccagcatggctttgcgacgatcaccgaagccaggtgctttgactgcgcagactttgatgatgccgcggatgttgttaacgaccagagttgccaaagcttcgccttcgacttcctcagcgacgatcagcaacggcttgctttctttggcgacggcgtcaagcacggtgagtaaatcgcgcacactggaaattttcttgtcgtgaaggaggatgtagggattatccagctcaacaatttgggactgctggttgttgatgaaatatggcgaagagtaaccacggtcaaactgcatcccttcgacgacatccaattcgttttctagagtcgtaccttcctcaatagtaatcactccttctttaccgaccttcttcattgcttcggcaataatgttgccgatagactcgtctgagttagcagagattgttgcgacttgggcaatggctttatcgtcactggttggcttggagatcttcttcagttcggtaaccgcggcaatgactgctttatcgataccacgcttaagatccattggattcataccagcggccactgctttgcatccttcacggatcaacgcctgggctagtaccgtggcagtggtggtgccgtcgcctgcatggtcatttgttttggacgcgacttctttaagcatttgtgcgcccatgttttcgaacttgtcggccagctcaatttctttggcgacagagacgccgtctttagtaatgattggggagccgaagctcttatcaagcactacgtggcggcctttgggacctaaggtggcttttactgcattagcaagcaggttcaccccgtgcaccatacgtgaacgggctttttcactgaaaataatttctttggcagccattatgtttttactccaagattcgcgatgagaacattagtgatgtatggaacaatgtgcccgctgttggcgtgatatgtcggatgcattcacgagtttcgggcttggcttaatcaaccgatgatcgccaggatgtcgtcctcgcgtaatactttgtattcgacgccttcagccttgtaggtgctgcctgcgtattgaccgtaaatcactttctcacccactttgacgcatggggtacggacgttgccgttatccagtggctttccggcaccgacggcgatgacttcacctttagtggacttttccttggcggagtctggaatcacgataccaccaggggaaacttcgtcggcttcgattggcttgaccactatgcgatcatgaagcggtttgatgctcataaagaccctctttaagtgattgatttatatagatcttacatgggagggttagcactcttatgtaatgagtgctaattccgcacatgcgaaaaccctgacgactgaaaactcaggatcaagacggcatatatggctgagtgtaggggtttcaagggggttcagagatttttttgtgaaattcatcgattaaatccctatgtgcaatacgtgtgtgcggcaagagtggttcgctgtgctgatgcagttggtgctctgaaaggctgcaagagcatgactcagccaacactccattttagtttaatgactggtatcactgggcaagttgggtaaaccgggttgcttgcatagccgtattacgttggcagattcggttggatcgtttgctagcgtctgactttttggcatttttgatgagtggtggtgtcaggcggtattgatgctctgctgagtgcgcctgctgtaggcattgacctcatgaaacataacgaaggcacgttcatggcgtgacaaaagtatcgctgaataggctattaagtatgtcgttattcacattaatctcacaaatctatctgtgcccgatatcagagagtcgttcagcctttacactgtgatcttatggcatctgacgtatacctgattttcagcacctgccctgatttaccgagcgctgagattatttctcgcgtattggtacaggaaagattggcagcttgtgtgactcaattaccgggtgcggtctcaacctatcgttggcagggaaagatcgagacgacgcaagagatccagttactgattaagaccaacgctgtgcatgtgaacgccgctattacgcgtttgtgcgcgctgcatccttatcgactgccggaggcaatcgcagtccaggtcagcgtgggattacctgagtacttgacttggattaatacagagattgacgaggaatactctctaccatgacgttcttgcatcgtttagccacattatgtgtattggcactgatttcttttcctgtagtcgccgttagcgaaacggacctacttccggtggaaaaggcttttgtggtcggggtgaaagctcttgatcgccatcatgtgttggtgcattggaagatcgccgagggttattacctttaccgacataggattgcggtgcgggtcttgaatgatggtgtgctcaaaagcgattccaagctgaatttgccaaatggctacaagaagaatgattcgtatttgggggacgttgaaatttaccgtgggagtctgaccgcggtgcgcagcgtattgcctgtcaaaggtgtgcataaactgacgttgcaagtgaactaccagggatgtgcggatgccggtgtgtgttacccgccgcaggtacgcacgttgcatgttgcgttgccgactggtggtaatgatttggataggggagctgcggttgataggcaggatagggggagtgctgttgacgcgcgaccattgctcagtgagattgttcctggagtccgtgcattgccgcttccagccgagcaggcgttcggttttgaggcgatcgttggtgatggcaatcatctgctgttgcgttttaccccggccaaggggtactacctgtaccgtgaccgcacttcactggccttggaaggtgataagactgttcatacgggtgtggcgtattggccgcagggcagtaagtatcacgatgagcattttggtgatgtggtcgtttacttcaatcaaattgaagtgatgctgccgctacagcgcgattattcaggacctatcgctaatgcgactctggtagccactttccaggggtgccaaattgacggcatttgctatccgccgatgactcgtcgggtgcgtttgtctttgccttctggaaaggtctcttcgccgaatcgcgctaatgctataccgttgatgggtaaccatatctctctccagaacccattgcgttcgccaggtagcaacgtcccgccgggcacggccagtcagtcggccgtttcggttgacagtgctttggaaaatcacccgtcgtacagtgcgagcaagtttttcatggcgttgtctctggcattagtcggtggtttgctattgaatttgttgccgtgcgtgttgccggtgttatcgctgaaggtattagcgttggctaaaagcggtgagagccgtgcttgtgcgcgtcgccatgccatttggtacacagccggcgtattgctctcgtttggcgtcatcggcggtatcgcgattatggcgaagatactatggggctttcagcttcagcagcccggctttgtgggcgtattggtttacttgatgtttgccgttggcctgagtttgtcaggggtctttaccatgagcagcaccaagtttggtgcgataggtcagtcattgatggcgcgcagcgggccattaggcgatttcttcgctggggtgttggcttgtgtggtgtccagtgcctgcattggtccattcatgggccctgcgttggtctacgcgttcaccgcgccgccgttgttggcaatgttggtattccttacgcttggctttggtttggcattgccgtttctgttgcttggctttgtgccatcgttgacacgtcgtttgccgacgccgggtccatggatgcagacactgaaatacgttctggcattgccaatgtatttgactacaatctggttattgtgggttctgggcaaacagcgcggtgtggatgcacagtcgttgctgttggttggcttggtcatgttggcaatgggattgtgttggttcgagcgcagccgttggaatgctgatcgctgggggctggtgctctccagtgtattgttattgttgaccttgttgccgctttggggagtgacgcaactgaagataccgcattcgatcgcgcagaatgtcagtagcgatgaagtggcttactcgccgttgcttctggatcgtttgcgtgccgataaccgtgttgtttttgtcaatgtgactgcggattggtgcgtgacctgcaaggcgaatgaacgcaatgtgttgtccagtgatgcttttcacgatgtgatgcatcggattgatgctgtgtatatgaagggtgactggactaatggagatgctcagattagtgcgtttctaagtcagcatcaggcagtaggtgtaccgctgtatgtggtttatgggccaggtgcaccgcccaacattcttcccaatgtgttgactaaggatgttgtggaggatgctttgttgcgcgctgcacgttgagtgctacgtgtgcttgctgatcttaatgaatgcgcaaataggtatttggagtccttcttagtttttgggtgaatggcagggtgtggtttttgatgtctgcatccgcactgatggcagtggatgggcatgttgtgtgtattgttggatatcagtctttagtgtgtttattccgtatgttttggtggtatgtggttgagtacggtgatgttgccgcgtccaggtcggtaacccgcgtgcaatccgcgtgcaacgtagtcaatccctgctttgcaggcttgatgcaggttcagaccaaggcacagttgggcggtgatcgctgaggatagggtgcagccggtgccgtgggcattcaatgctaagcgtggattgctgaagcgttcgcgtaatgtgccgttgtcgaagcgatcaatcacactgttgccttcgtttaaatgtccccccttaagtagtaccgcgtgagcgccaagtttcagtaatgatgccgttgcggtgtcggcatcgctgctgctgtggatatgacgattgaggagctgctcggcttctggaatgttaggtgtgattaaggtggctaatggcagcagctgggtgcgtaaagcctccaatgcgctgtcttcaaggagtgtgctgccgctggtagcaatcatcacgggatctaggacgatgcaaggtggttgatgccgttgcaaggcttcggcgaccagtgtgatgacttcggtattggcgagcatgccgagtttgacggcgtgtacattgaagtcagagaagcaggtgtcgatttgtgttgcgataaattccagtggcggtatatgcactgcattcaccccgcgggtgtgctgcgcagttagcacggtaatcgccgagagtccgtgtatatgatgtgcggcgaacgtttttagatcggcctggatgcctgcgccgccgcctgtgtccgagccggcgatagtgagtgcggagataatgttggggatgttcatgtggtcattgtgcaatgggtttttatgtcatgcacgttgttgctgtggtgatgcgctgtagtgcgtgtcgcatgatctgccctccaggtggagggcatgcgatgaatgttgcattggtgtagcagtgctacgacgtgggttgtaggtggattgctgcggatcgttagtctaaagcgttgtattggtgtgtgtgtgctgcttcgggcaggcaaggctcactcagtacggtgatcctgtgtggtgggaggtgagcaatattacgaaggctggtttaatgtgttggcagagcagtaaaaatattttcatctaatgatgtgtgtgaatcacacaaagagatgtctgccattatttattacctttagtgtttttattgatttatctaaagtgctgagaaggtgaatacgaatgacagtcacggtgtgactgggtgaagcgtcattgcgatgaagcagcatgaagtagaagcgggtagggtgaaacgcgctctgtcaggaaataggggctaaaaatagccattagtctctgcggcgggcgtggtctaaggcttgtgatgaagtgtctagtaatccattggctgagctatgcgcgggtaatagtcaggtttttatttttttaatcaattcaaatcacattgctaacgtgctgcttatagcgtttatgagtaatgtctattgtgcggtgttggtatgcgataggtacttggcacgggaattgaatggtcagaagtgtagagaggaaaaaaggccgccatgaggcggccaaatgagacttaattatgcgtgagtgatgattttaatctatttaaaaatgagtggatgtcaattgcatcacataatgatagagggagatttattgaatgtgcagaatgcaccatttcaatggttctacaaacggagtttagtttcatgcagtcagtttgattgaacttcattggcggtgatgatgactcactcattatcaggtgatgagttcagcacaggcagaatgctgcgggatattggagatgacagtgttggcttttgtggctattggcactgaaggaaaaagatttgaaatggatgtttctggggatgtgtcgcatgttgttgccaatgaatggattcatgcattgagtggtgttgtcggtgcaatgccaggtgcagggtttgtaagagaagagcaaggaaacctgctgagtcatgcaatctgcgtcttgtcatgtcggttccggtggatatcgatgatgattatgtgggtcggtagtgtgtcaagtcatgggcaatgcttcggaaatattcgcaggcggcgttgttgaaattcagtaccagtggggatgaatcagcggctatgccattgaaacactgagtgatccgaatgtagtgattgcttgttatcagccacagcatgtcacggcttgttgcgttggatttacttgttgtgcaggtttgaatgtgtaggcagtgccaagtggtttgcaggatgcgttattgggttgagtgacgattgctgcttctcatgggcgagcgggatgatattcattatttttataatgagatgatttttatagtgagttttatcggggtcactcttctaaggagacacggagtacactcgttgccagcgtcagtcggggagattggattcgcatttttcatgggtcctcatagattggtgaatcgtttaattagatggagagcgttgtatgcctgtgtcccgttttgctgtgtttggtcatcccattgctcactcgctatcaccgcgcatccataccgagtttggccgtcagatgggtgtcgcgctgaactatcttgcatttgatgttgccccagatgcgtttcgtgtttcgctggagcgttttgttgcggagggtggatgtggtgcaaacgtgacgttgcctcttaaggaggctgcatttgaggtgtgcacaactttaagtgcacgtgcacgccgtgccggtgcggtcaatacgctatctcgggttgacggtgtttggcatggtgagaataccgatgggacaggtttagtacgtaacttgacggagcggcatggtttggatttgcgtggtcgccgcgctttgctgcttggcgctggtggcgctgcacgtggtgtggctcctgcattgctggatgccggcattactgagatggtgatagttaaccgctcccctgagcgtgccgatatgctgtgcgatgcgcttggtgaacctggcagagtcagtgcacgctactggggtgacttgggtgatcttggaaattttgagttgatcgttaacgcgacttcgatcggaaacacatccgatatgcggactttctctctgccgcgttcgttgttggacagtatgactgcggcggtagacctgaattacggtagtgcagcagtccccttcctggcctgggcgcatgcggttgagacccgctatgtgatcgacgggttaggtatgttggttgagcaagcggctgaaagtttctctctctggcacggtcggcgcccggatactgatccagtgtatacggtattacattcagagtatggcgctcctggtcggtcatgactgaaaaataggcgtgctttttagtacggtgtacggtcctttctgtccgttactgaggtcgttgctgagtaagccaacatggtgtctcaatggagtgggtgagttgatgttgtcaaaggcggcggtggtgtgttgttcttgatgttttgtgtggtttgttatgaggtgctgtgttgcggtaaggatgcaaatgcgccggtattggttgcctgttgtagtggtgatgttactggtggtgatgaaaagtcgcaggatcgacaaatattaaagagatgcctgttgaagcgccgctacggagttgtgttgagcaatagcaattccaggggctgtatttggaacagggatatagtgccgcgatttttttgcatagtggaaaagcgtagttcacagtccttggtgtgaggtgtgaggtgtgaggtgtgaggtgtgaggtgtgaggtgtgaggtgtgaggtgtgaggtgtgaggtgtgaggtgtaaggtgtgaggtgtgaggtgtgaggtgtgaggtgtgaggtgtgaggtgtaaggtgtgaggtgtgaggtgtgaggtgtgaggtgtgaggtgtgaggtgtgaggtgtgaggtgtgaggtgtgaggtgtgaggtgtgaggtgtgaggtgtgaggtgtgaggtgtgaggtgtgaggtgtgaggtgtgaggtgtgaggtgtgaggtgtgaggtgtgaggtgtgaggtgtgaggtgtgaggtgtgaggtgtgaggtgtgaggtgtgaggtgtgaggtgtgaggtgtgaggtgtgaggtgtgaggtgtgaggtgtgaggtgtgaggtgtgaggtgtgaggtgtgaggtgtgaggtgtgaggtgtgaggtgtgaggtgtgaggtgtgaggtgtgaggtgtgaggtatgaggtatgaggtatgaggtatgaggtgtgaggtgtgagtcacaagggccgatggatggggataggtgatatgaagcatgctgctgattgaatggctagaggcccgcacgttcgaccacaaaactgctggaagatgattcctcggcgtcattggcactttgttgtgcttcgtgctgggtttcttacaagagaatttcaagaaaaggattcttttcaaggatggctgcttgcgatttacgctttagaagtgcggtgagatcgccttggcgttgtagcagcatgatgaattcttgcagcgaacacagaaagatggttttttgactcagtacattcctgcattcggagaggaccgattccgtatcgccatgtgttgctatgaacatgccatgcttattggtacgtcgtttttcgcattcctgtcgatagttgttcatgctgaggagtgcagtgagccgttggtttatttcttcaaaccttgcacgttttgtagtggctgctagatgtacttcttcatgttgtgctagagcttgctgacgcgcggtctcccgttctcctgctcttgctgcatacgggtgaaggcatctttggtattgaccaatgtaaggatctcagtgattttaatcctttcgctttgagccggtctttttctcaacagagttcgaaactttccaactctgcgatacgcttgacgatgtcacggcgagcaggcagaccattgtcgccgcgtgtattcaccttggtgagaatgtggcggacaatggcgaacttggtgattgaatggtgatccacgtctacggattgttgcacttcagcacgattttcttgagcgacccctgtacgatgaagaaacagcatgaggtcttgtttactgcggcaaagcaaggggatggtatcgacacgtagcgtgaacagttctggtggggtgtggaatgcttctggctgttttaactcgtctttcaatgtctgattgattgtgggttttgatatggggcagcagcttgttttcaataggtggtttattgattggcgatttggcggaagtggtgtgatttgaactcatgaatggttgtgcagcgttgttgagcttgtagcgctatgagtaatcaactgcttatcgttgttgcgtgtttggcgtcgcagtggctatgtttgtgcagcaggcgctaaaagatgtgtatccgcctctaaccgtgatatgtgctcaagcagcgacctggtgatcagtaggggtgcagcgcgcagaggggacgggaataccgttacgcagtctgtagcagcgcgcttgcttgcaggcgggaaggtcaaaccggggaatgaggcgctcttgctgagtaaccgcttgtttttcttagtggttaggttggttgaactagctgcgttctagcctattgcgaacagcgcgctgcgcgtgacctataggtcaagcatatgaacctggtaaccctgagctgtcatttcctttgccagagttgttcctgcatctttttgcaggtcgtccttgaagtagatatacagcagtccatctatgtcagaaggcttctccatgttgttcggttccttcatgagaatgacaacgttcttgcgaccgagcagtgtgagcatcatgcccagctccagcacaacgttttggtgcgcacggaacgccttttcttcctcgtggcaggcacggaaaccctcgtcatcaggtgtggcaagcactaccgcgaacttcacctctgccgtgtacttctccagcttctcgatgatggtctgtccttccgatggaagctggtccaagatcagcggctcaagtttccagcggcgcagcattgcttcaagctcagtgcgcgctgctgcgtcgtgcccatagacgacgaataccttgctgagcattggcttggtagcagcgccattctgaggcgcgggtgctgccgcaacatgcgcgggctgcacgccaagacactccttcacggcgtcttgattcttgccctgaacgatgaagttgccagtgtgataactgttgacgatggcttcattctgtaggcgaagctgtgttcctttgccattcgatagcgcaacttcgttcgcaatttggaagccgcccgcttggaggcacgctttaatgtcgtcaagagtcatcgccattccttttaagctccctaaatcgctttcttggctgcttcgctgagtacatcaacaacgatgtcacgcacaccagacgccaccgaagttctgactttcgccatcaccttcttgaagcgaaggcaggtaacttgggtcttgggactgtctttggtcagttgggttaagtcggtgcggaactgttgaacttcgtcaggcgtcaggtcagtgcctgcttcaacaagctcaacagtgccagcaatcttgcgttcagcccaagggaaccgactgccgcagttgttgcagaaggtgggcggctcgtagtctccgccaaatccgagaacgccttcaacgtagtcatcaccgcgaatggaagcgctgcatttcgggtactggaggatggtcgcttcaccagaatgggagcagaacgcttcccacaattcatgcttctggtctgcggcagtcgttgcgacgtgtccatttgtgcagatctgcgcggctcgatacgtgcccattgtgctgccttggctattgtaatggcggtgggtcagggattcgaaccctggaaggggttacccccttgctagttttcaagttttccggtctcagactttacacttccttccgccactttaataagccatgcgcccctttataggtcaatgggttgcgttcgctttttgttttgtggaacttgtcgtaactttatacggcgcgcttacgaactgcttatgagcgcctgaaaagatgcggccggcgactgcgccaacagtcccgaccgcgtggtcaactcccttatgtacgaaggaagccaacgtgacgatagtaaccacaacagcaccagtcagcgaggtgcgccgtgcctaagctgacgaagaactacatcgacaagatcacagcgcctgctgacaaggaggcgttccactgggatgactcgctcaaggggtttggcctccgggtcacccctaccggcaagatcacctatatcgtgcaggggcgcgtcaatggcagctcgccccgcatcagcatcggcccgcatggggtcttcaccgtcgatcaagcccgtgatgttgcccgcgaacatctgcgcagcatgcgcatgggcatcgacccgcgcgccgtcgccaagaaagaagccgcccagcgcgtcaccctccgcgatgtggccgacgggtacaagcgcgaccgcccgctgaaggacagcagcaaggccgagattgaacggcatgtgaccacaaccttcgaggcatggttgaagaagccactcagggacatcacgcgcgaaatggtgacgaagcgcttcaacgagataaagaatcacggtttgcgaggtaacggcccagcaccagcgcaggcgaatcaagccttcgccgtcctccgcgccttgttcaattacgccatccgcgaataccgcgagccggacggttcgcccgtgatccgagataaccccgtcgatgtgctctacaagaagtgggtgccgctcaaacctcgcacgagccgcgtgccggataacaaggttggcgaggtgtggtcattcctggtcgaagctcggaagaacgcatacaaccgcgatacgtgggcaagcatcgacgtaatcatgttcatgatgctcaccgggttgcgcattggcgaggcgtccgcgctcacgtgggacagggtcaatcttgaggaggaatggtttcacctacccgaccccaagaacagcaatccagtctggattcctctgtcgtcgcaagcactcgaactgctgaagactaggccgcgcgtaaagggcaacccgcacgtcttcccatcatggggcaagtcgggtcatatcaaagatccgcgcgacttttggaagaaggtcagcgagattgcaggggtacatctgtcgaatcacgctatgaggcgcacctttacgcagatcgggacggcgcaatgcgtcattgagaagttccgaatcgacctgctcacgaaccacaagaccaaggatgtgacagtcaagcactacctcgacacacagcacctcgaatggctcaagccagagacgcagtgcatatccgattggattgagcagcaggccgcggcattgaacaaccgtttagaagattcaacggtttaatttatccaacattgccgcgtaaagccgtgttagggtagcgccaactaactcgcatcccagttcaagcgtgatgctgtccccgccctggtcgggttgaactggcgagaagctgcatgggcagcggcgggcatcaaagtctggaaacaggcttgatctctcaccgactgcccattttcatttgtggcgtggtgggcagtctgaggactccgcccatgaccacactctcagcgctcagccccgacctgctgacgaacgaagaagctgctgcactgctcggcatcaaacccaacacccttgaaatctggcgcacgaagggcaaaggcccggaattcgtgaagctcgggcacaccaagtccgcgcccatccgctacctgcgcaccaagattttcgagtggctggagctgcaatcattcagcagcaccagcgcctacgcgccgaacgccaaacaagctgtttgacggtcatggcgacgaaaacccaatgcagccgcgcaacttgccgaccccgcacacccgccgataagccctgcataactccatcaagaaaaaagccgtcgggtcaggacggctttgagaaggaatcaacatgcacagcacgcatagcgtaggacatgccgcttctggcggctcggagaatttgcaggcggcaccgccgccgctacagcacggccagcatgcaggccaagggggtagcactggcgcggtgccgatcgccgccccagccgccccgcagcccgattggttcgaccgcgtgctgcaacaggcagcgcaaccccacagcgacaagagcgcgctcgtgacgatcacgcaatcgttcatcaacgcaatcgagcagcaagcgcagcaggtgcaggccgaagcgttcaagctcagtgggccaatctcgcagcacgaatgggatcacgcgcgctcaacgcagccagcagtgatcgacaaatggttctatgaggatgtgggcgtcttcgttgctctgggtggcactggcaaaacgacgctcctgctgttccaagtgattcaccttgtgctgggtcttgagctgttcggctacgaggtaatcaaccccggcacggtcatcatattgaccgccgaggacagccgcgaaacgctggtcgcgcgtctccgctacatgtgcgcccagcttcagctatcccctgctgacgtgcgcaaggtgcaggaaggcgtcatcatcaccgacgtgtcgggcaagggtatcaagctcgccgcaatcgaaagtgatgtggtcgtgccgagcaagttccttgaccgcttcatcgtcgatgcgtctgaggttcatccgtcgctaatcatcattgacccgatggtgtcgtttggcgttggcgagagccgcatcaacgattccgagcaggccatgattgacgcagcgcgacgcattcggaacatgctgcgttgcgcggtgctctatgttcatcacactggtaaggccaacgcccgagacaagacgctcgaccagtacagcgggcgcggcggtagcgcactggcggacggtgcgcgcatggtgcatgtgctacagcggctcgaccccgaggcatggacggagcagaccggcgacacgcttgaaggtgaagagtccggctttgttctggcgcgcccgaaaatgacatggtgcccgcctcagccgaacatctacctgaaacggcagcactaccttttcgagcggttctaccctgttgaatcgacggaaggtgctgggctggtaatcgacagggacgccgacaaggtattccagttcgtgaaggacgaatacctgaaaggcaagaagcacagccagaacacgttgattcagtcgaagctgctttcgcaggcgcgcatccgtgccgcagtggagcggctgaaggctgacaaccggctaattgtcgagaggataaccacaggtgggcagggaggcgcccggtcgtttttgcgcccgatggaactcccgcaataggtcggaactggttttggtgtgttgctgtgtttttggtgtgttattgctgtgctaacacggcaaggggaagggacacatgcaaccggcctttttgccgtgttgctgtgttaccccttagggcaaacacaccaaaccaaaggaaggtcgggtaagcacagcaaggccggtattcggcccgctgcgccgctttggtgtgttagcgcgcgtcactgctggtctgcctgctgatcccgttgaacttgcgccaagcgtagaactcgcaggccacgttgttctcgttccagccgttccccagtgccgccaccttcgcgtccttgatcgttgcgcccgggttcgcgtccagccacgcccagacagcagcgcacaggcctccttcctttggacgcttcacgccgttctgctcgatgcgctccaccttcggggcggctgccttcttcgccttgcttgtggtcaccccctgcacggcgacagcgggcgctacaggctcgcattcggtagctgtcgccgttggggtattggccgcaccctgcgcagcgtttgcgggcggctgcttcgccttccagccgaagcgtacttcgtcaccgttcttatgcacggtgatttccaccagttcggcgagcacccctgcggcaacaccagcgcggcgggcgttctcgcgtttcgtgtaggtcttggtttccatcgtcgttgctcctgtgcgggttgtagatggggcaacgctaagacgcatctccgagactcggcaacgactttttggatgcacccgacagcgcatgtgatgccgaacgaataacgctgaattacctgttcttcgtttgttctagaactgtaatgcgttgttttaaataaatattccttgcggacctctcggataatttcccagcatgtaagcaatgcgtacccgctacgcgccttttatcaaggagtttgcacatgcctacccccatagatgcccgtatcacgccctcgctgcattccgagaatgttcgccagcttgacggctacagcgacgacagcgcgccgtatctcggccccgtgatggaaacgctggacgatgcctatatcacgttgggcaagattcacgatgcgcgcgaccacgccagccgcaatcaggcatggacgccggagcaggcagtgattgccgtatccgatgccgcctacaagcaacagcagcgcttgctgtcgaagttcgacaagttgtccaagaccctcgatcagcagatcaagtcgatggacgagatgctgaccggccccctgcaacagaaggcgggcatgggcacgctgaacaccgagattcggaaccacgtccgcgcaatgccgaccgaggagcgccagaagttcttggaggatgcgctggcccgcaaggacttgacgagtctgacggcgattctcggtgggccgggttatctgtccgggttgatggatgcggaggttacgcactacacgcgcaagctccacgagattcagcatcccgaggttgttggccgtcttaccgcccttcgcagtgccaaggctcacgttgagaaagtcggcccgctggtgatggggcaggttgaaaaagcgatgggcagtgattggggtcgcgtcaccgcacttcgtgaaaacaacagcaaggcgcttgccgcgctcaagtttggcgacggcctgtaaatccctgtaatcaacaggatgtcgaggtaatcaaacatggcggaaaccgaaacgccggaatggctgaaagcgcatcaagaagccaacgcttcgtcggcaggtcagcgaggctgggcacccggccagtccgggaacccgcgcggcaggcccgcaggatcacgcaaccgaaagaacgtcatcgctgatgagtttgcgaaggacggcagcgcggtggctcgtgtggtcatggatgccgcgctgggtggagacatgcaagcgtgcaacatggtcttgcagaggctctctccgccgcttcgtgcccgcgctgaaaaggtggcgtttgaactgaccccggacgcaccgctgcaccagcaggcgaaccaagtgctcgcgtcggtagcagaaggcgtgattgacccggagaccggcaaattgctcatcgactgcatccagtcggttgcgggcatccgtgccgttgatgaactggaagcgcgccttatcgcgctggaggagaaacaagcatgagcatctatgacaccgacagcattccgctgaatggctgggcgcggccaaagatcgagcgtccgatagacacaccgcaggggcaagccgatctcaagctgatcgtcgagacctgttactccgccattcttaactgcgacgaccctgccgtgcgctggcaggccgcgcgcctgttgcaagcaatcggcccattgaaaggaaccctgcaatgaagaatgacaacctcgaccacgaaaaccgcccggtcaagtacggcatcacgcccgacgaacttcggcagattcaacagcgccgtattgaggcgcatgcagcccgcgagaccagtgacgcgctgaacctactccgggcggtcaagctgggcgcggcattgcgcgagtctcaggactaaccacatgagcatcagcagcgccaaaggcatgctcgcccgcctcaagcacttggagcgctcgcaaggtgcgaccgacgagatgcgaggctgggtcagtgacatgctcggcgctgccattgctgacggtcgcatgtgcccagtcgacggccctgtggtgcggcattgcgtgttgaactggatcgacgacggcaccgcacgcgccgggactgctggctgggggttgctgcgatgaagccgaatttccaaggcttcgtagagccgcgcatgtggccgcaggacggcggggagcgacgtgagcctgtgatggacatggacgccaagccaccccgcgccgttcgctatgtcggctggaagaagtgcatgcggagtggtcagctcttttggtcggaggacgtgttgcgcttgcgtctctgcacgccgcaaccgaaccggcaaggatgcaggagcaggcaagacgacgacggcatctgaaaaaccctgtaccgcccttttcgtcgtcagcggtgtagtggcgcgcagtcctggagaaactgcgccgtcccatcgggaaccgttggacgttaatcaaacggactcagctaggagcggggtcactcctgccccgcgcgacctggccttcgacaccgccgcttggcggtgttgtcgtctatgggctgcgcgagcgtagcgggcggctggggcgacgatcaccacactagccgccgctagggtactggcgagcactgcacgcggcctgtagcggcaagcatgccagcgggcaaggaacaacaaacacggagttattcgggcttgcccgctaaccgattgctgcccttgcggttagctcggctcccggcgctgcgaataagcccagcgtaaaaggattacacgggacggaacaacgtagcgggcgaaatcttggcctgtagcgtagcgatgatctgctctagctcgatacgagcctcagcttgcagtccaaggcacgttgcgatgccgttagcatcggtacttagccgagaggccatcgacaagcggaagtttccgtcatcggcacgcgccatccggtaggagtggaggtgcattgagtcaccgactgccgctggattcttcatgtggtcaaacttgaattccttggtcatgtaggccaggaacttgtcttgcaccacgagaacgagcttccgattgacatgctcgaacgtctgcaccttgtgatgcatctggacgaggatcgtcttcgcggtcatcttccagttcatgccaaaggacttgtcggactcttcgccgttgtccccgcgcgcgacgcccagctctttgagcaggcgctgccgttcaggccatacggtgcccgtcgtatcgagcgtttgcagctcgatacccacaaagtcccgaaccttgccttccttcgccgacacaaggacatagtcgatgcttccaccgggcacggtgacctcggacactagatgaagctcgttccccggctcgtggctggtcagcagatgcaaacagtcggtgaagatctgcccgcgctggataaggcgcgtggggcaaatgatgatcggctccggctcgcgcccatagagaacggtacaggagccaatcgaaatctcggggttagacttccgaacgttgtagcagcgcttgccgagaaacgggcactgctgatccgcgatttcattctgccagtcaatacccggcgcgtcggcggctttgccgaacagttcgacaactttgctcatagaagaccatcgcacttttcttgcgagagttcgagatagtggcgcgatatgtcgatgcccactgacttgaggccaagattaccggcggcgagcagtgttgtgccagtcccgcaaaatggatcaagcactatgccaccgggtgggcacgtggcaagcaacggtcgccgacagaggtctaagggatacggggcgaagtgcgcgccgcgtcgttgggtatcctcaggaatgatgtcccacacgtcaccgggcttgcttccattgggatggtacttgaggaagtagaagcctttgtctcgaagctcttttgcgcggcctgaaaccttctcactatccgaatgcgtggcgcgttggtgaccgcgaataatcatgcggaagtcagagacgttaccagcgcccacgtcggcaagcatgcggtcaagggcagcgaatgcagccttcttctcgttctcgtcgagtgccgtggaaagctcaagctgcctcttgtagcggacgccagagacgcctgtggcagaaacaactgcgccattgacgactttcgcttctcgcggtttcgaccgaatagcgtcggcgttgtagtagtagcccttcggctgcttcacgaagtgaaagagattctcatggacgttggctaggcgatctttgctgttatccatgccgcccttcaacttgttccagacgacgctgttgcgcatcgtccagccttgaacgtcggtcagttcgaaagccactctccacggaatcccgaccaagcccttgccgttgtaggtatcgccgatgttgagccagaacgaccccgtaggcttcagaactcgcttcagctccaaaaagattgcagccaagtccttaacgaagtctctgtaatcagcctcaaggcctatgcctccgttctcatactcccgctttccccaatacggcggggaagtcatagcgaagtcgatgcattcgtcgggtagcgatttgagaacggcgagtgcatcaccgttgagcagcagcgggcgcagcgaggtttcccgctggtaggcagcgaacgcatgcccgaagtctgccgagacgatttgtggtgacgactggctgctgtcgcttacggtctgcttacggcgagttgtgccgctcactacctcgatgctcccgtcactcactgaaaccctctcattttcaagcactgtttagcgacgcagattttcgcgtaagtgcttgtttttattggcggaagcggtgagattcgaactcacgaacggttgcccgttgccggttttcaagaccggtgcaatcgaccactctgccacgcttcctacaactgttttcaagactagtgcattcaaccgctttgccaacccacctaatttcgtgatgtgttaataatctgtttagctgcatgaacgcttccatcagctgaagttttctaacacattgtttctgcagtatgttttgagggtcgcgaccggtgcaaaggattgcgccgcgatacttcatctatacatgtgtgtccttattctctgttgaagcacccaggtgatccaggcggtgggggtcattgcctttttgtccgccctgcccaggtgacttagacagaagcgcctattatcacatgctccgtgctggttgattcaactccccattaattcagttgcatcccggcgaccgttgaatgctgatgttgcctatatgcagttgctactgcattgggggatattttgtcaggaattccgacaggcgtttgagcaatgtatgttgtgcgagagcaactggaattgcagtgtaccttcggattacgtggtgcggtgctgagccgggcgagcatggtatgacgccagcatcgtttgatgcatgggtggaggtcaatggctcatgtcaacgtgagtcactgcggtgtggcgcaatcttatggtgcgtgcactgtgtgcggcttcagttagtgctgtagatggaggagtgttgctgcgtgaaactgattcgctgcgcatcaccatggagtgatgctgttccaggggaggcgttcttaaaacgtatttgttgcctgtgagcactatgtatcggtgtgcatctcacagatctatccgtgtcacattgcctaacgatgtaatggatgagagcactttgggcagtaataacgctggctcatcgcgcaagcatctgtaacgcagatcaagatatggccatgtaaaagtatggacgtacataagacgacgcctgtgccgtgatagaaccggcgtcgtcatacgtatatgggtgctacttacttgacgctcagcagtttgacttcaaattgaacagcggcgtttggtgggagaatattacgtggatcggcgccgtaagcgtcagctggtagggtgatttcccactttgaaccggctggcatatttattagggcttcgcgcatgcctttaatgtcaatcgcgctgaccttaatccctgggatttgctgtgcttggtgtccctgttgtggacgttgtccccatgggaatgggccagcgacttctaactgaacggtactggcctgggtcggcttggcgcccttgccaacttctaggatcttgtactgcacgccattaggaagggattttacacctgtggcgctcttatttttggtcatgaattgttcactcttgaccttgttttcagcagctgctttatcgtattcggccttcgcttgctgtgcgcgggcttgttcgcgtttttggaatgcttcaattgctggacgtaactgctcaacagtaacgcctggttgctttttgctgtaggcgtcctccatacccttgatcacagagttcatatccaactgctccccgcgcccagtcagctcggctaaagcgctgccttgctgatagcccaagtaatagcttatttttcccttttcggacgtgatgtcctgggcgaatgcattgccggtcagggccagggtcgcaacagcgactgcgatcagacgcaacttcatcaaaaattctccagataatgatgatataggatagcgggcgatatttcgttccgccacttgcaagtgtcaggctaagacagaagacacttcatacaagttcccgtttttgttcactcagcattgatttgggataatgcattggtgagatggcgactccaatgcgagctggtgagttaaatctcatgtctatgtactagtgatgtttttgaaatgtaaggtgatggtcatcatagccgctttgaaccttacggtatgcggtacgcttgatggtgttcgatgctttttatttgttgcactgcatccttgccaagacaagtaggtgatctctttagattaacagttgtattgatgaggatgagtttaattggtgagtggccagggccgctttcatcaggccgagatgcggtgccggggcgtgacggccttatatgggcgtcgtgttatgcgggggtgcattgactgggtaaggtgacttttgggggctggtcaatgtggtttaagaattaaagttgcctgctgaccaagttcaccctgttgtttgtgattgagaataggtgtgggatctccgggcattcccacaagatgattcggtattgcccggcaatctatttgagactgcgatgaccgatcatcctgccatcctcttattgcgttgcgtgcttgatcaggatctggaccgtgctctgaccttggggctgatggagtatgtgcctgctttgggtgatgcaatgcttgatccaaggtatccggacttgcccgcacagctgcttgccgcgcaaagacgcttacgtcaggcctgggctgcacgcgatcgctaccgtgcgcgtgctgtccggttacaacgtgttgccgctgcacgtgaaatgcgtcgtgcgacgtcttccgcacgttcatcttccacggggacatcctctgtcctcccgcctttggctgtggagattctcaagcgtgctaaggccaaggcggccggacgccaggatatatgacgatcggatctgctgataaacccgtgatgcgtcgtggtagcacaatgacccgtgcggagattcgggaagcatttgtgcggttacaagagatcaatccacatccaaccacagagctgaaatacaccactccatttgagctgttgattgccgtgatcttgtctgcacaagccactgatattggagtgaacaaggcgacacgtcgactgtattcgcttgccaacacgccacaggcaatcttggacttgggcgaggatgccttgaagcgccatatttccacgattggcttgtttaatgccaaggccaagaatgtgattgctacttgccggattctggtggagcaatacggcggtgcagttccgcgggatcgtgccatgctagaagcattacctggtgtagggcgtaaaacggccaatgtggtgcttaatactgcctttggcgaacctaccatcgcagtagacacacatatctttcgtgttgccaaccgtactggtttggcaatcggcagcaatgtacgagtcgttgaggatgcacttctcaagcgcatcccgcaggagtttttgaaggatgcgcatcactggctgattttgcacggccgctatgtttgcaaggcacgcaaaccgaactgctcacagtgtgtgattgctgatctatgtcgctacaaggacaagacgccagcagcttaggagttgctattacattttttaaatcattggaaggaagacacatgaagacacacaaggaatacaccagggatgtttattatcctggcttgccctttatcaatccgttgaagtgttgctgattggggactctgtgttgcgcatgggcgattcaaataagccaattgataagccgtttgtgtcggattgcatggcaccatgctttgcttccttatcagcatgacgccatgttactccacgtggcagccggtgatgacacgtgtgcagtgattccattccttaaaccccactgcaacgtactttattttctggccattgatggtcaggacaccatacggatgtaaggtggcttgggtttacgtccgctaccaccgaacgggggttgcccacgccagtagcggatcagtaaccagccaaacagcatgccacctagatgtgtgaaatgtgcgacgttgggttgtatgccagtgatgcccatgagcaattcaatgacaccgtataaaatcacaaaggttcttgccttcataggaatcggtggaaaaatcagcaagatgcgttcgttgggaaatagcatcccgtaggccatcaataaaccgaacacgccaccggacgcaccaagcactggcgtaccactgctcagcagccaactgaccaatagctggcagacgccagcaccggcgacacacaccaggtaatacgtcaaaaagcgcttctcaccccaggtatgctccagtgccgcaccgaacatgaatacggcgagcatgttgaagaataggtgttgaaaaccctcatgcagaaatccgtaggtcagcaactgccaaggcatgaagctggcacctgatatcaatgtttcgaggctgttaccgcctagcggccacagcatcagtgttgcgaaggtgttctcgcccaacatcatctgaaataggaaaacaacgacgttggtgagtagtagacctttggtgacggtaggcagtttcggaaacatggaaggcttcacccagaaattgccgccatcataactagctcgttattgaagcgcctaacattgctgtgtttcagatgtcagcggatgcgtgatcgtgtgtcagacggcgttttatccgctgttgattcacagattgctgctaccagtctgttgcttccctagaggcagcgttgtactcgtcggagtgccacgatgcgttttggtgaccagttctctgatggctcctatggttcctgccgtcttgtcttatgcagattgcatccttagtaccgccgatcttcccgttccagcacgtggatagggtgctgttcaaatggtattccagtgttttgcatggcctggctgatcgtgtgcttacagcctttttcatgcacagcatccgctggtgcggagagtcatcacatgaacagcggcagccccggtgcgatctccttgcctgctgtataaccgatctgattcagcgtacagtgctggctacgcgtaatggttcccagcgtagataggtaaaactgcgccatagccattcacagggaccgaagcggaagcgttgcagccaccatcggcttaaggccacttgaaaggtgaacagtacgattgcaaatgggagctgccaaacccgcggtaagcgctcaaaaaaccccagaccatacccataaaagatcagcgtacagaccacggactgtagcaagtaattgcttaacgccatgcgtcctgcgggtgcggcccaagtcaaggcaaaggcggcacgtatcccccaagccagataacccagacacatcaacaacccggcgatcatactcaacgcaaacgcactgaatgcccgcgggtcgacccgagtcacatcctgccaagaagccagatgaacactgagcagcatggccgttaaccctaacggccatgcaccccaacgtagccaagcgaacaaacgcctatagcgttctggttgcagaatcgcaccgctgcgcacaaaccacgttcccaaaaaaaacatgcctaacacatgtacaccgttgatgatgatcgattccaggtcattcgttacatcgtgcagacgctgtacggtggcttgcacataactgccagcaccgtaggcgtggcgctgttcgcgtattacctgtgccgtctcggtgccgttctgtgccaatactgcttgccagcttttgatgttcgcgctattggagcttgtcgagacgataaaatccgcccagcaatatattgacatcagcgccacaggtattagatacaacaacaccccggtgaatggcagcgctgcggtggataacctacgtgatgttaacagcggcaatgacatcagtgcgtacagcaccaagatgtccccggaccagatcaataccgcgtggatgagtccgattgtcaacaatcctaagctgcgtcgtaaatagaacggcatgaatgcgcggccgacgtctgcggcgcgcttgctcatcaccgcgaatcccatgccgaacaggagtgagaacagcgtgtagaacttaccttggatcaacacgtagatcagagcgtcggcgaggcggtccactccggtcaactgtggatcaatgccagtggtaccagcatccagcggccccacgaagcactcgatattcatgagcaaaatgccgagcagcgcacaaccacgcaggatgtcgagtatcgcgatgcgttcgctctgggcaatagggagtagcggaggagtggcagcggacatacacaccatagataacgtagtgttctgcaacggagcagtcatgcaggatagctggccaagcgtcagtgctggtgaccaccctcaccatgcacgtggccgtgctcgatttcttcttgagtcgcctcgcgcacctcaacgatctccacctcaaagtgcagatccttaccagccatcgggtgattcaaatcgacatcgaccacagtcagcccaaccttctgcacagtgacggcttgtgttccggtattggtttgcaacaccacctgcatccctggggtgacacgggtatttccaaacttcttcttcggtatcctttgtgtcagcccttcgcggtactccccgtaagcatcagcggccttgacgtcaacgccgaagctctccccggcgcgcttgtccagcattgcgttctccaagcctggaatgatgttgccgtgaccgataaggattgccaacggattacgttccttagagctttcgaacggcgcttgaccgatctcggaaacaatgtagtgaaagcggacaacacagtctttttctatcttcatatctcactcgttgatggggctatacggtgacagccatgttaagcatggcttgtcgacgggcggtgcgtgctggggcgcactgtgatgagggtggacacgtaaaggcgttcgattatcctgactccatgaataacaagccagttcccattgttttgcggaggacgtccattggtttgatcctcttcatcctccctgcaatgctgattggttgcagtcgcgtgccggtcaaaacacagcccaagcccgcttcagtcaacgtgtggcccctcacaaccccagccaatccagaggcagccaatgaggtcgtgatgcgtgccttgagcttggtcggtactccgtaccgcttcggtggcaacacccctgagagtggattcgactgcagcggtttagtcagctacgtctacagggatgcactcgacctgcgtctaccgcgcacttcctacgagctggccgcagtgcagggtcccaagattgacgctgaacaactgaccactggtgatttggtgttctttgggagtgctcgcagtgtcactcacgtgggtatctacctcagtgaaggtcgcttcgtacatgcccccagcagtggtggcaccgtgcgtttggatcggcttgataccccttactggagggatcattacactggcgcaaaacgtgttttacgctgaattgcaacaatcatcactgtacataaaacggaaatttaaccttttttgaaccttatgcgagctggaccggggcatcatccccccttactttcgaaacactgtgatgctcgcgtgaagataaaagacgaacagtttaaatctaaccccgctgtccatccatttcagaagccgctttatctactgtgctcaacaacgttgttgttgggtcctatatcggctctggcgcaggatatgccgcaacccccggctgctgttgccgttcatgccactcccgagggtgctcagggtgagtctgctactgctactgttgctgttgctgctaatactactgctgttgctgctactccccctcgcaaccgtactgatgcggctaccactgttgctttggccgcattgctgccgcatctggccaacaacgatacgatcccgctgatggatcgttctgccctgtttgctggtgacatgaatcgggcgttgactggttacgatgtatcccagagcacccttgcagcggccgagaaagcagtcaccgataaaaagacccaagtagtcctcaggcgtgcaatgaacctgcttggtaccccctatcgctggggaggcgctcgtcctggaggttttgattgcagtggcttagtcaactatgtgttccgtactgcgcttgggatccagttaccgcgcgtctcccgtgatatggcgcgtcactctggtggtgagttgattaaggatcgtaaggaagtacgcactggtgacttggtgttcttcggtaaagctggtcgtattacccatgtagggattgttctggataaagggttatttctgcacgctcccagaactggtaaggatgttcgtatggattccttctccagtggctactggagtcataaattcatccaggcgcgtcgcgtcctttgaatgattcagacactttacagtgtcatcggattgaagaggagagagtatcttgaatgcactttttctttggaatcagaagaatggagcatctgccatctctgtcagatctcccataccttagtttttgcaaatgtatgcttgggtgtccgtcgatcatgatgccgataaatcaagggattctcgttcgcatcacacggttaaaaacatgacattgatagcgctttcacttgcctacatgcttatttgaattgttcctgatcttccctggggcgataccctgaactggcgtgtcgtccctacccattgccgcgcatgatgcacatgtaataagtgttaaagctttccgggcgatacccgtttgatgtgctgctgccatcgcacctccaggaggcttgaaacctccttggtgcatctgtttttcataatccaacgtgcttgagattgcggatattgatgttgcatcttgttccactgacgcatggccaatgctgttttcccgggttccatccatcctccccacacctggaccttgattgcccggtaattaccccatcgcagcaacccttgcgccttgcaatgctgtccatccaacacagacccagataagggggcacgcttgccctcactatttgcggctgatgtcttaatcaagcctgtatatatatggagcaccgcagtgcgacgcaatctgactgagcaccgctcgcgtcgccattcaacacattttcttggacacaatcaggatgtcccaattccaacgttactggacgctgcctcgtaaaccgctgtattcagtaatcccgtttcttttgccaccagcaccggcaccaacatctgtccggtgacgtttgtcattgtgcgcatcatgtctaacacgcgatcgatggcatacagataaccaattacctccagcggcaaatgagctgcactcagcaccacggttgccatcaccaccgccgtacctggcaccccggccgtgccaaaactgccgagtaccgatgcgataaaaatgacgaaatattgattcgcggtcagcggcaccccggtgtactgagcgatgaacaccgcacacaacgctggaaagatcgccccgcaaccgtccattttgatgctactgcccagcggcacagcaaatgcagcgtagtccttgttaacccccagattgtgcgtaatcgcgcgtaatgccactggcatcgcagcaaagctggaagaactgacaaaagcgacctgcatccctggcgcgacacccctgaaaaacttcaatggactcaaaccatgtgccagcagaagcccgctgtacaccaccacaatgtggaacgcacatgccaaataaagtgccaatacaaagtgaccaaacggcagcaacttctgaaaaccatagctaccgaccaacgtagcgattaatccaaaggttcccagcggcgtcatctccagcacaaagcgagtgatttggatcatgatctcgctcatctgcccgatcagcttgcgtacctccgtcacgcgttccccaagcttgacaatggccaagcccaacagcgccgcgaaaaagattactggaagaattgagccacgtccggccgccaacgtcgtttcccccgtgctattactgcgagtaccgatgccggtcaatgcataaaacggattggatggcaccacatccagcaacacatgcaccggactcggcacctctggtggcgcccatgctgcatccacactcacagtgaagtcaccattacctggtttcagcaacgtgcccacacccaatcccacacacaccgccaaggctgcggtgacgataaaccacagaaacgtgcgtccgcccaacatggcgaccgaccgttgtccgtgcagcgccgcaatcgcgttaatcaccgcgaagaacaccagcggtattgcgatcatcttgatcaacgtgacatacagcgtgcccaatggtccaaaccaagtcttggcggccggtcccatcacccaaccaactagcgccccgagtacaaagccagcaaccacgcgttgccagaacgggatacctaaccaagccgagatcaacttcataatgaaagagtgtccaaaatgggggaacagacaatagcccttgtgttattcgtatatgaaaccacagttgaacactgtcatctatgtgactttatcctctgttaataatgaatgcgtttctcaatttatcgaccatcaaatcacattatgttccgacgttttgctactttcctcattcttcctgtcgtgtcatttgccatagcggtttctttcccatctgctgccacttctacccaggtgagcgtgcccaaagtgactcatcctgccgctgagaccccgcaatggtggtatcagagcggcgctacacgcgctgcggctaacggtgccatggctggcaaagccaagaatgtcatcctatttctcggcgacggcatgagcttcaccaccgtagccgctgcacgcatcctggaaggccaacgcaacgctgccactggcgaagagaacgtattgtcctgggaacatttccctgccaccgcattcagcaaaacctacaacaccgatgcccagaccgcagactcagccggtgccatgaccgcaatcacctctggagtaaagacccacatgggcgcgatcggcgtcagtgcaggccagcgcaacgactgcgttgatagcctcggcaaaggtctacttacctggctgacactggcagacagcgccggtatggcgaccggcatcataacgaccacccgtatcactcatgccaccccggcggcgctctacgcacataccccggaacgtcattgggagagtgatgccaacctgcctgaagccgccaaagcgggcggctgccgcgatattgcccaacaactcctcacctctacccgctatgggcgtggtcctctggtggtgctgggcggtggtcgcgcccaattcatgcctgcgcaccaacatgacccggaatatgctgagcgtactggcttacgtttggatggacgcgacctcattgaagaatggaaacgtgcacatcccaatggcgcttatgtgtggaacacccaccaattcaacgccgctgctggcgcaccggccctgctgggtttatttgagcccagccatatgcagtttgaacacgatcgcgaccgacaccccaacggcgagcctagcttggccgagatgacacgtaccgcgatccaatcgctgtcccgcgatccacatggctttgtactgatggtcgaagggggccgcattgatcacgcccatcatgccggtaacgcctacagagccttggatgaaaccatcgccctctcagatgcagtacgcgccgccgtacagagcgcccctaaagataccttgattatcgtcactgccgaccatgcccataccctcaactttgttggctacccagtccgcggcaacccgatattgggcaaagtgcacagcagcagccgtgatgcaggagaccccacccagtacgcacatgatttaaatggcttgccctataccacattgacttacgcaaacggtcctggccacaccgccgccagcaatacacagccggccggaaccaaacacttcgaccatcaaccccgtacctatgaattagtccgtggtcgcccagatctgaccacgatcgacaccgaagcgcccgactatctgcaagaagcgctggtaccattgaagactgagagccacagcggcgaagacgtcggcatctgggccacaggccccggcagtgctgcgtttcgcggtgtccttgaacaacatgtcatctaccatgtcatcgtccaagcgacacccgcattacgacagcgcctgtgtgccgctggcacatgtaacgccgctggcgtgccgatcaagttgccacagctggccgatttcgaacgcaaaggccagaggagggagtgaaccactcccacgatgtctccctgatgtacaccatgcgcatcctgggcaagccttgacccacaaaacacctgattgctcactccagagcgtccgtatcgccccccttccaggcaatcccccaggccgtcaaaacccaccacatttaccccacacagcctccgatccggagtgttagtggcatacacaacaacccgcgtgccgtatcaaacgctgatgtccacgagcacagcgaacaggcattgctttctggcgtgacacatcatctgtgcctgtgcctgtgcctgtgcctgtgcctgtgcctgtgcctgtgcctgtgcctgtgcctgtgcctgtgcctgtgcctgtgcctgtgtatttgaatacaccaggagacacacttcctaccgccgctggcggctcgctgcgtcagcagagatactgcatccccgtttcacacccctacattgaccgtgtcttttccctttccccgcattccagatcccggcgttcccgtcttggttgctttcagcggcggattggattcaaccgtcctgctgcattgcttagccagccagccaacccagcgcatccacggcctggaagccatccacatccatcatggactccatgaacacgccgatgcttggaccgcccactgcgccgccttttgcacacaacactacatccgcctacacatcgcgcgtgtccacgtttcccacaacagcggacaaggcttggaagcggccgcccgcaccgcgcgccgtgccgcatttgcccacaccttgcaacatggccactacctggcattggcgcatcattgcgatgaccaagccgagacctggttactacgcgcactgcgtggctcctgcgacggactcgccgccatgcggccgttgaccccatttgccgcgggccacctgtggcgtcccctgctgacccactcccgggcgcaattattggactacgcacaacagcagcacctggattggattgaagattccagtaatgcggatctgcgtcatgaccgcaacttcctgcgcatccacgtattgccattactgcatcagcgttggccccaagccacggccgtactggcccgcaatgctgcactggcagcggccaacgccgacctcctcaatgctgaagatgccgtactgctgcctgacctacttgaccctgacggcgcattggacatcaacgccctcactgcccacccacccgcacggcgcgcccgactgctgcgcgcctggtgtgcccgcgcaggtgctcccccactccccgagcgcggcgtgaacattatcgagcgcgaactactgcctgccagacacgattccgccgcatgcttcacctggtctcataccgagatccggcgctggcgcctgcgcctatacctgcatcgtccacaaccgccatggccccctgactggcagcccctgtggagcggcatcacaccgctgatcctgcctgatggcggccaactccacctagagagcaccgatcacgacaccgtgcccggtttcccacaccccctgtgcgtgcgtgcccgccgtggaggagagcgcttgatcttgcctgggcgcacccattcccaccccctcaaacacctcttacaagacatcggcatccccccctggcggcgcgcatcaatgcccttactgtgcgacggtgaacaaattctcgccgctggcgatgccctactggccgcaccactggtcacctggttgcacgctcatcgcctcaaactacgctggcagtcccacaacaacacatgcatttgaccatcccgatgacaccccgcacacttccccgatgccaaaacactccccgccagacacctctcccgttgcccgctttgaacagtcccttcaagaactggagcaactggtacagaacatggaaaccggagcactgagcttggaacagtcccttggcgcctacgaacgcggtatcgccctgtatcgtgaatgccatcaagccctggaacaggcgcaattgcgcgtccggctattgagcgatccaatgcacccagatgacggtgagccgtttgatcccagcctcgtgagtacatcccagtgagcgaagcgctgttcacgcgctggcgccaacgcaccgacagctacttagaacgaacgttatccatccccacccaagcgccacagcggctccacgccgcgatgcgatacaccgtactgagtcgcggcaaacgcatccgtcccttactggtttacgctgccggccacctgtttcatgtcgatgaacccctactcgacgtaccggctgcggccgtggaactgatccatgcctattccctggtgcatgatgaccttcccgccatggatgacgacctcttacgccgagggcgtcccaccgtccatatcgccttcgacgaagccactgcaatcctcactggcgacgccttgcagaccctggcgtttgaatgcttagccgatgccccatccgacacctccctgcgtatcgcgtggctacagacattgacacacgccgcaggggttgccggcatgtgtggcggccaggcaatagatattgacgccactggccaatcccagacactcaaagcactggaagccatgcatgcgttgaagagcggcacattgatgcgagccgccgtgagaatgggtgccctggctggcgacccttccgcggaagatctgcactccctggacacctttgcggccacccttggattagcattccaagtgcgtgacgacatcctggatatcgagtccagttccgaacaacttgggaaaacggccggcaaagatgccatacagcagaaatccaccttccccgccctcttgagcgtagaaggtgccaaatgctatctacaagaattggcagaacgcctctacacccaattgcacccttacggcgaacgtgctgcccccctgaccgcactggcacgcttggctgtagaacgtgctcactgaggcactgcctaacggcccattaatccagaggccccccccatcacaccaatgcgcccaaccatgacaacgtcatgccataaaaaacctcaaaacctcaaaatgattctagcctgctcatagcagaggcgctgataagcgtcgctgatccgcgataaagtgtgataaacatcagaatatgaaccgataaggaactgagttacccgctatggagatggaactcaagcagacaccccgccgtcccacccaggcaacggcgccctcattcaccaccgcaccctgtgtcgttacagcggcttggccgatcacctgcactaccgcatcacccttgctacagcaacgtacaacgctgccccagcgcatcactgcatcaaaccagtgctttgaggagtgcctaggtcactgcctatgtcattccgaaggaatgtatttatatggtttattgacagaaagacaccacggagtgtgttgagattctttacatgatgaaccttacatctttggagcgtattttgaacattaaactcaaagaatataaagagtatattgctgcgcattctcgttctgttcttgtggtgtttttcttcttgccgatgattgtcagtaaaatcgcgatattgatcggcgtgaccaatattggttttgtttcgccatgggaaatatcttatcggacggcattcggcggtgccgaagggtatacgctgacaatggtcatgtattgggtgatgtcgcctcttgcgtttttgtgggcgtattcacaagagaattacaaaggaatgtccttcaaaaaagcgattatcaccattcctatgtgttggttgatattaattggtattggggtggttgcttttaagggggtgtctctttcctcccttgaacatccagttgtatcttcagaaagatttttattgtttgggaagtggcatgttggtttttgcctgatatatggaggcattattttttcttttttttcacgatttatatggttttatatttaacgctgcgtttaattttaaagatacttaaatgggagtgatagcgtcatgagtaataatacggaagatacaggtaaagcaacatctcatcagatggatgacattactttcaatgagtggagcgaagtattgaaaatggaagcctcagcattgatgtaagaagtccatatgtaaaatgtgctatctatgaagagagtgatgacagtcatgcgcatgacaaaattaagagctttaataatattattctcggtactggttgttcttccagccttccttctcgccctctttgtgatctatttaaaactccagggtaatacatattatcttagcgtcaaaaatttaacgaatcattctatctatatcaaagaagtattggcagatgatagatctgttggattgaaagattttaccgttggccccactgaaatttatttaaattattttcatggcgtatttaaatcgaaaaaggtagagacaatgacgtttaacatcattgatgagaacaaaaatgcagcttctttgagctgctctctgaaagtgccttatgagggaataaagaactgtcttttgatgttctactatagaggagcaacagaagatgctaaatgctcgtgtgacaaccttgatgaagcggactgagacgaacgatcagtaaatatcattcacatcaccaggcccgcgtgccctggcagtctgttgcagcaagtttgcaacgacgcagcccgcaaccatactgctcgcgttgccacactcctacacggtaggcgatgaggtgagataaaaatcacccaatggttgggcacaagcaaaaaagtgtgatagaaataacgtaattgaactgataaggagcttagtcaccggctatggagatggaactcaagcagacaccccgccgccacacccaggcaacggcgccctcattcaccaccgcaccctgtgtcgttgcagcggcttggccgatcacctgcactaccgcatcacccctgctacagcaacgtacaacgctgccccagcgcatcactgcatcaaaccagcgctttgaggagtgcctagatcactccgaaggaatctatttatatggtttattgacagaaagacaccacggagtgtgttgagattctttcatgatgaaccttacatctttggagcgtgttttgaacattaaactcaaagaatataaagaatatattgctgcgcatcagtattatgttattggagtatttatcttcttgccgatgataatcagtaaatgcgcgatattgatcggcgtgaccaatattggttttgtttcgccatgggaaatatcttatcggacggcattcggcggtgccgaagggtatacgctgacaatggtcatgtattgggtgatgtcgcctcttgtgtttttgtgggtatattcaaaagcgaattacaaaaaagtgcccttgaaaaaggcgattgtcgccattcctgtgtgttggttgctattaattgtttttgggctatttgtttttgagggggtgtctgcttcctcccttgagcatcctgttaaatctttagagaaaattttcttatatgggagatggtatgttggtttctgcttgctatatggaggacttgtttttgcttttatttttaatttttttacgacattatctttaacgttgcgtttaatttttaagagactttaataggagtgatagcgtcatgagtaataatacggaagatacaggtaaagcaacatctcatcagatggatgacagcactttcaatgagtggagcggaatattgaaagctgggtctttggcatttattcaagagtatgaaaggtagtaaattaaatttttaatgtgggtgtctatgatgtttattcgacgcttaagaaaaagtttgcttttatttattttaggtgcagggatcggagtgcttccaggatgtggtatcactcgggtagaaggtctaggtgaaataaacagtgcaattgatgatgctttggttgagactgggctctgctcaactaatatggattgtaggaagaaacgtcttgtattttgggagggaaatgagaaaagagtgtatcttaatttttatgttggctcaaagaagattgatccatcgttgatcgaaaaggcaatttcgaaaaggaagaaagagattgacatgcgtacaatagtgacgatcacgttttacaataaaacgaaagatgagatgctggaaaatggcgtgatttataacatgatttttgtatctccatattataaaaaggatttatgatgagtaataatatatctgttgaaattaggtatgatgttggcggcgtagatggtattccacatactttcattgtgattaccttgcctgatgggactgaacgtgagtatggatatggaccagccaatccaggaagtcggtctggacctgggacagtatttgaaactggagcacacacgaaagaacgcgagcatgagtataatacaagcagttctaagcatagtattaccttggatcagtataatgcgttaatggattttattgaactcactcgtcaaggtcaaaaatattctcttcttggtggtttttcggatccgaatatttttaattgcaccacttggcaagtctcagcatttagatatgccggtatcagattgccttctatttcagctgaccgttggaatccatacgctcaatatattctggataaaatagaaaggatacctataatatctgcaccatctttatctgaattaagacgcatggaatatgaaaatttctttgaggcaagaaaattcatgccgcgtcgcgacccgctagtcctggacttggacggcgacggcatcgaaaccgtggccgcgggtaaacatatcctgtttgatcacgacggcgacggcatcaaacatgccagcggctgggtgaaatccgatgacggcttcctggtgctggaccgcaacggcaacggacgtattgatgatggcagtgaattattcggcgccgataccgtgctagccaacggtgacaaagccacctccggctttgaggcactgcgtgatctagatagcaacggtgatggcctctttgatgccgccgacgcccgctttgcggacgtgcgcgtgtggcgcgatcttaatcaggatggccagtcccaggccaacgagctgttcaccctctccagcctaggcattgcctccatcacgctgacccccaccaacacagaggatgtggacttaggcaacggtaacctcattgacaaccgcggcacctacacccgtaccgatggccgtaccggcgtggtcggcgacctgcaattaggtcttgagcacttctaccgcgattacagcggcgcccacgacaaggtcaccgtgagcgacgcggctcgcgccttgccagccatcagcggcagcggtgcggtgcgcgatctgagagaggccgctagcctgtcgcccgccttattggcggctgttcaggcgctgacgcccggcaccacccgcgacaccatgcgcgccgcgttagatccgcttgtcgccctctgggccggcacctcggccatgcctagcaccgagcagcgcttggagacctccgcagcggtgccccgtactgtctattaccatggtgccgtgcccgctgccgtgaccgcccaggggaaggaggcagtgcaagcctggatacagcagcagcacgcccgccttgggccgatcatcgccatcttggagaagttcaacggctccagcttggtcagcgaacgcaatggccaggtgtccacagggggcgaaaccttcacctggaaccgtgtcatccatcctgacggacacagcgaagacgtgatgagcatcctgctccagccggagcagatcaatagtttgatgagcgcctacgccagcctgaaagaattcgcctatgccggactggtcctcagcactcggttgagtgattacctgtctggactcaccctgacctacagcaatgatgcctttggatgggatgcgtccgccctagaggccaagctagatcacacctggcagcacaacaaaacccaagcgcttcaggatgtcatggacctgtaccgctatggcagtaacgccgtggcggcgagcggctggaaacccttcgatgccttacgccacatgatcgaccggaccgcagcaacccccgatgggaggcaagcgctggcggctgcggagatcaccctagtttctggaagtgcagaaggcagtaccgccgcggacctgatatttggcgatgccggggctaatattctgcggggtggcgcgggtgatgatgtgctctccggcggtgatggagacgacacgctatacggtggtgatggcaacgataccctctacggcgatgcgggtaacgacaccctctacggcggcggtggcaatgatcttctgctgggcggagatggcgatgacgtcctagacgggggtgaaggcagcaaccgtctggagggcggcgctggtgacgatgtcctgaaagtgtcgtattggtccgcagataacgtactgatcggcggtaccggcgatgacacgttgtatggcagcgcctttgcggatacgtatctatttaatcaaggagacggccacgacaccatcattgagcaaggcgggactgacaagctcgtgtttggtgagggcattgttgccgctgatgtccggttactacgccaagggcaagatgtggtgttggacctggggaacggccacgacagcatccgtttgaaggactggttgacttccaatggcacccgcaaccatagcgccgatattgaacagatcgtctttgccgatggaacgctctggactccggagaccttgagcagcatgggcctcaccacgctgggcacctccggcaatgacacgctcaagggctggcaaggcaaggatattctgctgggcggtgctggcgatgacgtcctagacggcggcgaaggcagcaaccgcctggaaggcggtgccggtaacgatgtcctgaaagtgtcgtattggtccgcagataacgtactgatcggcggtaccggcgatgacacgttgtatggcagcgcctttgcggatacgtatctatttaatcaaggagacggccacgacaccatcattgagcaaggcgggactgacaagctggtgtttggtgaggggattcttgccgctgatgtccggttactacgcgaagggcaagatgtggtgctggacctgggcaacggccacgacagcatccgtttgaaggactggttgacttccaatggcacccgcaaccatagcgccgacattgaacagatcgtgtttgccgacggcacgctctggactccggagaccttgagcagcatgggcctcaccacgctgggcacccccggcaatgacacgctcaagggctggcaaggcaaggatattctgctgggcggcgatggcgatgacgtcctagacggcggcgaaggcagcaaccgcctagagggcggtgccggtaacgatgtcctgaaagtgtcgtattggtccgcagataacgtactgatcggcggtaccggcgatgacacgttgtatggcagtgcctttgcggatacgtacctatttaataaaggagacggccacgacacgatcattgagcaaagcggtactgacaagctagtgtttggtgaggggttgcatcagaaagaggcgcgttttacgcggtcaggcgatgatctgtctctcctgttcaatggaagtgaggatcaggtgaccatagcgggttggttcaacgggtcagggcatcaggtggaatcgttggtgttccaggatgggacggtgctgtccggtgaggtggagcgtttgattgcggcgatggcgctgtcccctgcggcaacgacgctgcaagccagtgtgggtgatcacaaggagtcacccaggttggtcgccagttcgattgtctgagtatgtgatcttgttgttgtgttgtcaggccccgcagttgcggggcctggtgtgttgggatggccgagacatgttatttgcaccgttatagggcggtacgggggtggttgccgtgatgcaatgtcaatgccatgagaatgatgtgttctttttaagggcgcagccatgtgctcggtccgtcatggtggttgcctttgtagtggtggtctgtgtggatggtatgcatggtatccctcgcgatgcatcgattgcgagggattgtcatcaacacttgagacatgggtatgtgaatgtatcggcagcaactcatcattgtgagttttctgtaacgtttcacaggatgttaggggtgcgtggtgatgtggttcaatccagcacggttgagggtgtttactttggcaagacctcagatgtctactgggtttggtttctccggattgatgttgtattgctcaatggcacgtgcaacgtctttcccggtcattttgccttctttggctaatgcggcaatcgctgcgtgggcgataaagtagcggtccacttcgaagaagcggcgcaggttgctgcgggtatcgctgcgcccgaagccatcggtgccaaggacggtgtagtgcatcggtacgaaagcacggatttggtcggcgaacagacggacgtaatctgttgcggcaatggccggtccctgacggttttccagttgttgggtgacgtagggtgtacgcggttcgctgtctggatggaggcggttccatcgttctgtatcaaagccatctttgcgtaattcgctaaagctggggcaggaccagagatcggcagtgataccgaaatcttgatggagtaattcggcagcagcaatggcttcgcgcaagatggcgcctgaacccagtaattgcacgcgcagttcgcctttttttggttttccggcgtctttgagcaggtacatgcctttgatgatgccttgttccgcgccggctggcatgtccggatgggcgtagttttcgttcatcaaggttaggtagtagtactcgtcgatctggtcttgcatcatcgctttcatgccatgttgcaggatcacggtgacttcgtaaccaaaggtggggtcgtagctgcgtacgttggggattgcaccggccatcagatggctgtggccatcttcgtgttgtaggccttcgccgttcaatgtggtgcggccagcagtgccgccaagtaggaagccgcgggtgcgcatgtctgcggcttgccaggcgatatcgccgatgcgttggaagccaaacatggagtagtagatgtaaaacggcagcatggggacatcggacacggagtagctggtgccggcagccatccatgaggcgattgctccaggttcggtgatgccttgttgcagtacttggccggattcatcttcgcggtagtacatcaattgatcggcgtcgactggtttgtatttttggccgaagggggcatagatgccgatctggcggaagaggccttccataccgaaggtgcgtgcttcgtcggcgacgatcggtacgatgtgggggccgagtgctttgtcgcgtagggtgatgttgaggctttgcacaaacgccatggttgtagagtaggtgcgttcgccgctcgaggtgaggaggcgttcgtacttgtctaggccagggacgatgaatgatttgctggatttggtgcgacgttgtgggaggaagccccccaaggcttcacggcgggcaagcatgtactttatttccggcgaatccgggccagggtggtagaacggaatgtgatcggccgcgtccaattgctggtcgctgatcgggatgttgaatcggtcacggaagtgtttgattgcgtcgtggtccagctttttggtttgatgtgtggggttcagtgattcgccggcggtccccatgccgtagcctttgacggtcttggctaggatgacggtaggcatgccttgggtgttgaccgcgcgatggtaggcagcatagatcttgtgtgggtcgtggccgccacggttgaggcgccagatgtcgttatcggacaggtgggcgaccatcgcggccgtttctgggtacttatcgaagaagtgtttacgggtgtattcgccgccgaatgctttgcagttttggtattcgccatcgacggtttccatcatcagtttgcgcagcacgccttgggtgtcttgggctaggagtggatcccagtgtgctccccacagtagtttgatgacattccagccaccgccgcggaagacgccttccagttcttggataattttgccgttgccacggacagggccatccagccgttgcaggttgcaattgactacaaagatcaagttgtctaagccttcgcggccggcgagtgcaatggcgcctaatgtttctggttcatcgctttcgccatcgccgatgaagcaccatactttgcggtcggatggggcgatcaggccacggtgctccaggtatttcatgaattgggcttggtagatggcactcagtggacccaggcccattgatacggtgggtgtctgccagaattgcggcatcagccaggggtgggggtaagaggagatgcctttgccatcgacttccatacggaagtggtcgagttggctttcgctgatccggccttcgaggaaggcgcgtgcatagatgccgggggagctatgaccttggatgtataacaggtcgccaggatgttgggggctgggtgcgcgccagaagtggttgaagccgacgtcgtagagtgtggctgaagatgcgaaggaggcgatgtggccgccgaggtcgccgggcttgcgattggcgcgtacgacggtcgccatcgcattccaacggatgatggagcggatactgcgttctaatgcggggtcgccggggtttttggcttcgtcggctgtgggaatggtgttgacgtattcggtgatgggggaaaagggtaggttggtgccagtacggtgaatctgttcggcgactccttccagtaattggtgtgcacgttcgggaccggcgatgtcgatgacggccttgatcgattcgagccattcctgggtttctagcgggtttggatcgttgtgcagtgcttctttcaaccggttcattagtatttccagggcttcgcgcgcgcatgcgctaagcgttaaatatgtttggatgcgtaagtgtaacgcactggttccattggattcctggctacatcgcgattgcgtctgtatccggggtagtacatttgtgtgtgatgttgcaatgggggcaaggcgtgagggctttgtctggttgttggtttgtttgggtagaacctccaaaagcgcatgcctcggtttgtcaatctcgaaactatcgctatgcgtgtacttgagatgttgcatcgtgctgggtgtgtggacgatgtgtgcattcctcccgctctttttgaatgtataccgtaggtgttcggtacgatggcctccgatcctgagtgctgcaggtggatcatgtgttgggtgtgttggctggctttcgtgtttgatccggttgatgcatacgtgtcagtacagacgatgtgatggttttacccgtatgatcggaacttgtattttttttgatccatgatgcctgtgacagagtctgctttcgctttcgttttcccaggtcagggttcccagtctcttggcatgctctccgagtttgctgtgctctatccggagattctcgacactttcgctgaggcatctgagggagctggtgtggatctttggacgttgtcacaacgtgggcctgaggagatgttgagccgtactgagtacactcagccagcgttgttggccgccggtgtggcgctatggcggctttggcaggctcgcggtggtcgtgcaccggatctgcttgttggtcacagtttgggggagtacagcgctttggtagcggctggtgcattgtcattgaaggatggtgcttacttggtaaggttgcgcggtcagctaatgcaggatgcggttcctgtgggtgtcggtgcgatggccgcggtccttggtgctgaggatgctttggtggttgaggtctgcgcgcaggttgcgggaagcgagattgtcgtcccagctaattttaattcgccggggcaggtggtgatcggtggtcatgccgcggcggttgatcgtgcgctggtgttgttggcagaacgtggtgtgtctaaaacagtcaagttggtagtgagtgtgccgtcacatacgccgctgatgcgtgatgctgcgcatcgtctcgctgaggcgatgcttgggttggtttggaaggtgccgcggattccggtagtgcagaatgttgatggcagagtgcatgacggtgttgaagcgatctgtgaggcgctggtcaagcagctttatttgccagttcagtggacggattgtgtgagagagttggtcacatgtggtgtggtacgtatcgctgaatgtggtcctggtaaggtgctgatgggactcatcaggcgtatcgacaaaacattggatgtccgttcgttggcgactccaacggggttctctgatgtcttggacgagtggggtttttgaattgttttctaatggaaatggttggtgtggttttagggcttgttcttaagttctttgctgccgttatgcggtgttatccactcattgaggaattgaaacaatgaacaaacccttacagggtgaggttgcgttagtgactggtgctagccgtggcatcggtgctgcagtggctgatcttttggctgatcatggggctaccgtgattggtacggcgacgtctgtttctggtgcgcagttgattggtgatcgtttggctctgctggctggtcatggtcgcgccctggatgtgaacgatactgctgcagttggtgcattggttggggagattgccgaacaattcggttcggtctcgattctggttaataatgctggtatcactcgagacaatctgttgatgcggatgaaggatgaggattgggagtcgattgtcgacactaatctgagcagtatttttcgtaccagcagggcggtggttcgcgacatgatgaaggcgcgcaagggccgtatcatcaacattgcttcggttgttggcgtgactggtaatgccggtcaggcaaactatgctgcggccaaagctggtgtgatcggattcacaaagtcactggctaaggaagttggcccacgtgggatcactgtcaacgtggtcgctccggggtttattgataccgacatgactcgtgtgctgtctgagggtgtacgcaatgatatccttaaccgcgtcccgcttggtcatctcggtgatccggtggatatcgcgcacgcggtggcttttctggctgccccagcagcacgctacatcactggtgagacattacatgtcaacggtggtatgtatatgccgtgactcggtgcgtatcagggttgcatctactattttattgattggattgtgattatgcagcggtgcatggtttcgctgcttccattacactatccaacatggcccatcgtgatttgatggctttatgaaacgtcttaatttatagatttttgcggagtgataagccaatgagtgacatcgaagcgcgcgtcagaaaaattgtcgccgagaaactcaatgtcgatgaagaaaaagtaactaatacctcgacgttcgtcgatgaactgggtgcggattcgttggataccgtcgagttggtgatggccttggaagacgagttccaatgtgagatcggtgacgaggctgctgagaagatgacttcggtgcaacatgccatcgactacattaagagtaatgctaagtgctaatgcgctgtttcagtgctgacaacgcgtgcgttgtgtctgcatcatctgcatggggccgctgctgcggccctgtttttattgcaacgcttgtaaataagttaagaatgaagtttgtaatcgttccaaatagtaagaatccttggtcaggagatctgtaatgaatcgtcgggttgtcgttactgggatggggatggtgtcgccattgggcaatgatttgaccacaagttgggatggcatcgttcacggacgttcgggtatcgctcccatcgtccagattgatgcttctaagttatccacgcagattgctggcgaaatcaagggattcgatccaatgaagttcgtatccgcaaaggatgcgaagaaaatggattcgttcatttactatggtataggcgcagcgtttatggcgctggatgatgcaggtttggagattaatgagatcaatgctgagcgtgttggtgccttgatcggttctggtattggtggcgtgtttggtattgaggaacagaccatcaagttctatgaggggggcgtacgcaagatatcccctttctatgtgccatcgacgatcatcaacatgctgccaggacagttgagtgttttgaaaggcttgaaaggcccgacgttctctgcggtatctgcctgcgcgacttcaaaccactccattggtatggcaatgcgcatgatccagtatggtgatgctgatgtcatgttggctggtggttctgagcgcgcttcttcgccaactgcgattggtggcttttgtgcgatgagggcgatgtctacgcgtaacgatgatccaaccggcgcttcgcggccgtgggacaaggggcgcgatggctttgtgcttggtgatggtgccggcattctagtgctggaagagtatgagtatgctaaagcgcgaggcgcacgcatctatgctgaattggctggtttcggcgccacttccgatgccttccacatgacgatgccggtcgaggatggtgaaggtgcagcgcgttgtatgcgcatagcgttgcaggatgcgaaggttactccggagcaaattgattatctcaatgcacacggtacctcaactcctttgggcgatctgtgcgaaaccaacgcgatcaagacggtattaggagatcatgcctacaaagtgatggttagctcgaccaaatcaatgaccggacatctactcggtgcggccggtggtgtggaagcaattttctcagtgatggcgttgcatactggcatcgttccgccgacgattaatctcgaagaaccagacgaaggctgtgatcttgattacgtgccgcatgtggcgcgtgaggccaaactggatgtggtggtttcaaacggttttggtttcggtggtactaacggcacattagtgttcaagcgtatatgatggtttcctgtttgccttgacacgtttgagaggggtgcatgcttgagcgatgcgccctttatagtgtgtaaaaatgtgttttatccatcgctgttttggtgacgttgcagcggcgcttttccgatggcatggcgcgtcgctatgtttctatgtaggcggagagactcaacgtgccttccctatgcttcgcagctgatctgaatccagtctagactaatgacactcattcgatttctgcgtatggatcccgatttattgtccatgcacaggttggcaccggagcgttatccggcgctttttgaatctactgcttctggtactcagcagagtcgctgggatgtgttgttgcatacagatggtcgtttcttccgtttggattccgatggtgtaacacgcgatgctcagggcagggcgctgtccggagactttttgcaggtattggatgcagtgtggagcactgagtacgtgctgcgtgatacgtgtgaggatgctcctccattccgtggtggttgggctttacttcttgactatgaactagctgggcaggttgagccagtgttgaaattgccggtgcgtactgatggtttgcctatggcgttagcgttgcgttgtccggcagcggtattacgtgaccgccacagtggtgtttttttgattgtcgctgagctggggaatgagcatttactggacgtgattgaggcggatttggctgctcttgccttgttgccgccattgccggtttggcgatcgccagtggccgtcactgaggatgagccgtcgcagtttattgccaatgcagagcgtgtgctggattaccttcgtgagggagacgtgttccaggcaaatatctcacgcctttgggaagctcgctttaccactgcacttgatccagcagcgttatacatgcgtttgcgtgtagccaatcctgcgcctttctcgggattgtttgtggctcatggccgagctgtggtgagctcctcaccagagcggttgatttcggtgcaaggagcgcgcattcagacgcgtccgattgctggtacccggccacgttttgtcggtgacgatgacgcagcacgcatccgcgaactggtgaatcaccctaaggagcgtgctgagcatgtgatgttgattgacttagagcgtaacgatttagggagagtgtgtgtgcctgggaccgttgaggtcgatgagttgatgacggtggaaagctatgcgcatgtccatcatatcgtcagtaatgtgcgtggctggttgcctacgggcaggaccccaggggagatcattcgtgccgtgtttccgggggggaccattactggttgtccgaaggtgcgttgcatgcagatcattgcccagctcgaacaggtggcacgcggtgcctacactggtgcctttggatggctcaattgtgatggtgatttggacctgaacattttaatccgcactgctgagattgacggtgtgactgtacgtttccgtaacggtgccggcatcgtgatcaattcactgcctgagcgtgagctggatgagacccgtgccaaggccactggcgtactgcgcgccctgcatgtcatctgaacgttagttttctgtgatgctgatacgcgcgttatgctgtctggccttgaaggcttgacgaggtggacttggtgggacgcaaacgcggatgtctagtcgtgctggtggcaccgatgatgttggtgttgatcgttttactgggactcattgcacggccggatttaaagcattatgtgccaggctggaagtattacgcgcattatcagcattttgcgcatactccgctcagtgcgagcgcgcctagtgtggagattgcacgtggtgattctctgcatacggtcttgcttaaattacgtaaggctggggttcaaagcggtagcgactgggagtggcaactattggcatatcaggtaggtgctgccggtaatttgaagttcggcgattacgcattggtgcctgcggtttctccacatgatttgctacagcgtatgcgtcagggcaagggtgagcattaccgcttcactatcgttgagggttggaacattcgtcagctgcgcgctgcgttacgccaagctacccctttggtgcatcgtgcaggcatgctggatgatgcgacattaatggctcaattgggttttccgggtgaacatccggaaggacgttttttgcctgagacctatttgtaccaacgtggagacagcgacttggacattttgcgtcgtgcccatgcagcaatgcaaaaggcgcttgccgagacgtgggcggcgcgtgatccggcactgaagttgcatacgcctgatgaggcgctgattcttgcttcgattgtggagaaagaaagtgccttgtctaccgagcggccaaagattgctggagtgtttctgcaccggattgcgcgggggatgcgattacaggcagattcgacggtgatctatgggctgggaagcatctacgacggtaatatccgtaagcgtgatttaaagacccccaccccctataacacttacgtccacaccggattgacgccgactccaatttcaatgcctggccaggatgcactgcgtgctgtgacgcgtcctgccgtgggcgacgcgctgtattttgttgcccttggcgatgggagtggcggacatacgttttcctcatcactgcagcagcataacgcggcggtggcgcgttacttgcaacgccttcgtgaacgcgaaagcaaaacgaaggagcggcaatgaatggtgttgattgccttggaaattcatggatgatgtcggcacttaccccttggcagcagcgtgcttacgatcagatggtagcggcgttggatgccggccaccttgggcatggcttattactgtgcggtcccgaaggattagggcaacgtgcggttgcgcttgctttggctgatactgtccttggcaagggactgacagaagttgcacgccagcgttgtcgtaaattgatcactgccggtacccatcctgatctccaattggtctcttttatcccgatgaaaacggcagataagctgcgtaccgaaatcgtgatcgaacagatacgtgacctctctgagaagctggtgctgactccgcagtatggtcaagctcaagtggtgatcattgatcctgctgatgcgatcaaccccgctgcgtgtaatgcattgctgaagacgcttgaggagccagcctcggggtgttatctctggttgatcagcccacagccggcacgactgccagtgaccattcgcagtcgttgccagcgtttagaatttaaattgccgccgctgcacgaagcgctggcctggttagtggcacagggcatcactgaggaggttgccgtggaagcacttgatgcggcacgtggccatcctggtttggctatgcagtggttgtgcgatgaggggatggtattgcgccgcacggttgctgttgagttggaacagcttgccagcggccaaatgagtgcagttaagttagcgcagcagtggactgctgacggcaaggccgaacagcgcctgtatcatgcggctgatctggccttcatgcaggctacggctgtcttgaccgatccgtcacgtttgcacaagctggcgacttggttcgacgcagccaaccgtacccgtgatttgctgcgtaccacagtacgtgccgatctggcagtcattgaattgttgttagcttggtgcacccgctggggatgccgagcagaatgtaaggagtattgatgagtacaacaagtacgcgccagggtattctgtcgctcaccctgaaagacagggcggcgctctatagcgcctatatgatgtatatgcaaaatggagcgattttcgtccctacgcccaaacgttatttccttggtaacgaagtatttttgttgctgaccctccctgattccagcgagcgcttaccggttgctggaaaagtggtctggtgtactcccgttggagcgcaaggcaatcgtgttgcgggtatcggtgtgcaactgcccgatggtccaggaggggaagtggtgcgcaatcgcattgagacgttgcttgccggcatgttcaactcagataagccaacgcacacaatgtgattgctgttgtgcttgatgtgttgcttggttcatttataatcccgtacttagtgtcaaacgggcggttagctcagcggtagagcattgccttcacacggcaagggtcgcaggttcgaaccctgcatcgcccaccaataaaatcaataggttgcgcaatctgtggtttattgactgacacgcaactaacacgcaagcgctccatgtacgcatcaatggcccgaacagcatcggccatatagtcaggccggtacttggcgtaaacatccgtagttccaccataggcacggtgccccagcattccttgaatgtcttgtgcagccacgcctgccgagcgtagctcggtagccatcgtgtgccggatcacctttggaacggtgtccttgggtaagcctgcatgtgtccgtaatgcgcgccatgcagttttgaagcttgcaataggtttgccgtgccagtgcaccagcgggcctctgtctactgacagtatccaaggaaggagaaaatcacagatgggaacgacaggccgaaactttttcgtctgcttgcgccctggtggattctgcgtcaataggcgtcgttggatgtctgcgaactcacgccgtagtccgaggatcgcctctggccttgccagagttccataagcaagcgcaaggtacatacgttcatgagggagggtcgcggcctcccataatgcggctgactcctgaagcgatagcacctgatccctgggcggggcgtcttttcctgggatgatgtatggcaccgaagtaatttccccttccttgtatgctcgattcaatgcggctttccctacggtaagtatcctttttatatagccgtcgctacggggggtatcgcttcccgtctgtagccacctaacaaactcccgttgccgtgacggtgtgatctctgagactgtcgcacccgcaaaaaagtctgaccagtaccccaatgcgactttcgcgctttccgctgatgtgatgttgcaggcatgttgctgccaatacctggttaatactaagtccaggacgacatcctggggcgtttgtttgctgatatcgccatatttggcataccactcccataaccttactttggcttcttgaatatccgttgtgccaagagatgcgcggtttgtctgtcgggtagcggcgtcaaaccaagtgcggcaccaatttttggaacctgtgcgctggctgagccagtatttcccaatttgtcctggacgttcctgcattgttgaatgtattcctcaatgatttggttgctgtacctgtaaattcgggtactgatacgaatgggatgtatccggccagccatgcgttctcgggtgagtgtggctttgctgatgaggagtcggcgtgcggcttcctcttcggtatacaactcgggaagcttctcagcagtgctcatcatccccgtgccctcctgtagcacgctcctgtaacctccctaatgcggcctctcggtgggttccctctttgagtttttccgctttcgcgtctttttctttctctttttcagcgaccgtataagcagctaaagctttaataagttctgaaaaattgctcacacattcattggataactcgagtggcggggtgttgtgacgcttttcatttgatgtgttgttcataacgttattactccttgtgatgtgagtggtttacatgtttcgctgcgtttcaccgcctctagcagcaagtcctgtacttcgcgtttggattcacggcgggccatcactagctcatccaccgtgttcgcagccacgatgtggtgaatgaagacggggcgatcatgtccggcttgcgcctgacgtgtggggccaatgcgttcgacgatttgttggtactgctccaggtcccaccagtgcccgaagaacgccagaatgttcccgccgtcttgcagatttaagccgtgaccggcactggccggatgggcgaatagcacgggaatgttccccgcattccaatcgcggatcgtgtcggggtgttggtccaagacacgccctttaggaaaagcgcgctgcaaccgtgttacatcacttttaaagtgatacgccaccaacaccggcatcccggcggcctcttcgataatctcgtgcagcgcctctagttttgcgtcgtgcacgacttcccaggcctggcgtgtgtcatcggtatacagcgcaccattggccagttgcaggcatttaattgtcttgctggccgcgttaaaggcttctacttcggcgccgcattccaaggcgatgaacatctcttgttccatggccttgtacagacgttgcgcatgcgctggcaacgcaacgcgaatcgtattgacaatcggctggcgtaaatcaaagtacgcctgtggatcaagggataaacacaggtcgcgtattttgtcttgcatctctttcgatgcattgggcgtgggcacaaggcgcaccgcatggggatcactgccgatctgcaccacacggaaccagcgatcgataaacgctttaaaatgcgtccccagccgtgcccctcgatccaccatccacatcagcgcccacaggtcctgtagcccattcggcgcgggcgtaccggtcaacccaatgtagcgctccaccttggtatgcacatgcttggccagtgcgcgggcgcgccgtgtgccttgccgcagccggaaccctttcagcttggagcactcatcggcgaccaccatccggaacggccaacggtccccgtaaaactccgccagccattttagattgtcgtaattaatgcaatagatatccgcgtcctgctccaaggcgtggcgacgtgccgccgcactgcccacgaccacggacactcgcagatggcgcaaatgagggaacttggccacctcatccggccatgtcgtggccgcaacgcgcagcggagcaatcaccagaataggcgcaatgtcttcgaccaccagaagcacatctaacgccgtcagcgtggctaccgtcttccccaaccccattggcacaaacagattgcagcgtgggtgcgtcaggatgaaatcaaccatggtgtgttggtaggggcgtaggttcatgccgaagctccgctaatcatggtgttacactccccatcacatggggttaagacaggggcatgtgtgacatccgtagcgttcgatacacttaaatttgcgaaccggctgaaaacggcaggggttcctgcggcgcacgcggaagccgaggccgaagccttggccgaagtgttggaaataaatttacaaagccttgctgagtctgaatctaaaaacggcaaggccttagcgcgccttgaagctgatatgaaggaaggctttgcgcaggttgaccagcgctttgcgcaggtggaaaagaccatggaccagcgctttgcgcaggtggaaaagaccatggaccagcgctttgcgcaggtggaaaagaccatggaccagcgctttgcgcaggtggatacgcgctttgcggagataaaaggcgaaatgctcctgctcaagtggatgctaggcgtgctcgtggcgggcgttgctgcactgatcatcaaagcgtttttctgagtcacgccagcacctcatccacgcctttcaaggaatcgaccacgaccacgtgctgccccatgcggcgcatacgcgcatgctcacggacttgatgcggtgtacactgcttacctggggctttgagttccacccacagggtgcgcccgttaggcagcatggcgatgcgatccggcgcaccgtggcggccaccccatttcaccttgcggatttcaccgcctttggccctgacctgtgcgactaaatagcgttcgatcgttctctcacggggaatgttcatcattgcttcctataccggtaggtgtcgaagccttccgccgctaagggcaacccttctgcccaggggggcggtgtcgccatgagtgcggccaagtgcgcggcgttgaagcaggggtggtcatcggcttcggtaataatttcgtcatgcacggtcagcacgatgctgtatccggcggcttcaatcgcaggcatgcaggcggccaacacgtcgcggctcaccgcctgagtgatgttctcgaccagcttgccgccgtaggtagtgaggcgcgtccattttcgcgtgatcggatgcgtgcccatgtaggacagcgcgccgtgctcatcgactctgggagcggcgtagtaaagcacccgccccgacggcagacgcagccgcagccatgcccggcggtactgcactgtgatcccgcagcaggtatgcgccgtttcggggtgatggatcgcatccgtcaccgcgaactgcaacgcctgccaaaacgccgcaatggccggatgcgcattgcgccatgcgcgtttgaacacatcgcacgccaaccatgcgcgatcggagaggtcgaaggtgggccggtggttcgccttggtccattcaagcagttccgttgcctgctgaagcagcaggggcggtaaggcggcttgcgcggccatcgcctccaaatcaatgtggtacatggccgcaaaggcagcaaaggccccgacaccgccgccatagcccaaggccaattcctgcactttgccgatttggcgttgttccttgctcacggcctggggcgctatcccgaacgaatgggcgtaggcgcgcttataaatgtcgtcacctcgacgaataggcgcgtgatccgcattgcgttgcaaggcgatcggcgcgccgcgcagcgcaccgtgcgtgatggccgctcccgtgtgccatgtaccatccaccccttggcacgtatcaaactcacgaaacgcgtgcagcttgggggtttcaccggccagccacgccaacacccggccttcaatgttggacaaatcggccacgaccagctttttattctttggcgcaatcagacagctgcgcagcgcgctgctggtcagcgccatgacatcgtcaaagactaaatccacacaaccggctttcatggcatcgatgccgaccgcgatcacttcttggctgagcgtgggacgcggcaggttgtgtggctgaaacaatcgccccgcccagcgccccgtgcggctggccccgttaaattgcaacgtcccgcgcaggcgaccgtcagggctggtgcagtgcagtagcgcctggtacttagcggtgctggtgctgctggcttgtcggcgaatagacagcagttcgcgcaccgtctctgggagtgccggatcgtcaacgcaccgcgcgaccgtgtgttgctgcatgtccggcaacgccacgccgtgcgcggtgttcaggtgctgcaacagtgcatcgcgctgcgtcgcggcctgcaccgcgccgccggtcaacgcctcggtacgctgggctaacgtttgcttggcgcgttccacagcgcgaatcgcagcctgcaccaagtccgtatcgatgaggaccccgcgatcattgatggtttggtccaggaaccacagcgccagctccgcccccgcgtagttgtgggacggcaaccgcttcaccacgtctcgcatcgcggccacatcgcgttgtgcgtactccacaaactgtgcccagtccgtcggatgggtgtcacgtgtggcgcggcgcagcgtgcaatgggcggggcgcggtttgcaaaacagtgcaacgagccgtttgccgtctttgtccttggcgtgctccacaggcacgcgcagcagctcgcataacgtgcccagcgccccaggcagtgaatgggccaaggcctgggccattgaatcgcgccagcgctccaagggaatatcaatgccacaatggcgtagtacggtccgatcaaaatgagagttgtggaaatacagcagcaccgcagggtcatgcagcgcggcggacaggtcgtcaggcagcgtggccgtggccgtgcagtcccacacctgcaccggcccctcacccaaggcgtaggcaaacagcaacagctcggcgtgctcggcatacgcatgcacgccatgggccatcgggacgggggagtacgtctctaaatccccccataggatcggtgcgggtggctgcgcggtggccatctcaggcggcgaccttcagcgagtcaaccaccgtcggattccagagaatctggtagctgctatgcccgttgcgtgagtacggaatggcttcgccccatacgcgaccggcttcggttaattcccagtcgtcgcgttcattacggaactgcaagcctctggaggctaataactggttcaccgccttggccgagcaatgcagctgcttgcctagttgcgtcgcattgagcatgcaaagcgggtcccgcagtgcaggcaatgcacggcgtatctcttcggtcgttaaattcgtattgcttttgatacaggccaaggtcgcggcggcagcaattcctggttttacgcccggcactgtagaaatgtattggccgattaacaggagtgcggcaatgcgatcctgcgtcggcccaggcaaggtgggcagcgcccccggtgtggagtacgtgcctgtcttgcgaagggtcggcaggacttcgctcgtcacccaacgcttaaagcgcttggccgcaggttttgtactgcccatgatcagggcatataaaccggattcgttgatgtggttggtctgtcgggtgcgccctaggttgtcggttgcgtccagcttctggacgtcttctacatcgacgtgcgattcaattgcttgacgcggattaccaaactctaatattgagcacacgtcattggcgttgaaccagggcgcgctggcctcgtcgagctgaatacgcacatcttttgattcaaattggaatggagtgattgcgttggccgaatgagtggagtggtcaagcgcgggacggttgcctgtcttgtggatggttggcaggacttcgctcgtcacccaacgctcgaaccgttctgcggcaggcagtttgctgctcacaatcaagcggagcatgtcaggctcggagatgatccggatttcttgaatcccgcctggtgtctgaagggggtaacgcttcggcacccccttgcaatgatcgcccaaagctttgttatggttggtgtagccgagtacatcggcaacgtctttgccgacaaaccacacttcaccgtgatcatcgaccacggtacgcacggcgtgtgattcaaattggaatggagtgatggcgttcattgtgtggtcctctgtgggttggaagggagtggagatggaaggtgcgtgatgttgggggacactgtgttggcccgctttttgaactgcggctgcgggcagtgcttcactgatgagccaccgtctaaggcgtttagccgcctctttggtgctgccgatgagcagggtgagcactcctggctcattgagatagttggcgcgttgagtccgcccgatggtgtcgatgattttgcgtttcgatacattcctggcacccacatgctgagcaagtgcggcgcacggatttaacaactccactgccgtgcaaatgtcattggcgttaaaccacggtgtaccggcctcatcgacctggacacgcacggcgtgggattcgaattggagagtgaactcagacgatgcattcatgagggtgtccttaaaggtgtaagggggcggagggtgcgcgttgcgtgtgctgccgagggtgacaaaccggagtcacccccacggcatgtctccttcaacatccgccagctcagcaatggcgctcaggtcctcgaagtcctccacgctggccacaccgcctccagcgaacgcctcgccatcacgcaggaactgcacaccacccagcgaggcgttaatcctcttgccgtagttgttgtcctgtgcccagagttctatgttggcgttgacgtaacatccggcatacggcctgccgtcctgcgcggcgagcggggtccggtcacggtcgatcaccagtggccgtgccttgttacgcgcagagacgtataggtgccctgcaaacccgtcataactggctttcaggtcgccatcatgcaacgcgactctgtcgcccatacgcatctgtttaagctgggccgccgccttaacgccccatttgtcattggccatcttgtcaatcgcctggttaagggctttgacttgcggatcggcagggtcgatgaggaagcaggcggagaacgcggcttcgccttcaccattcactttcttaggttcaaacaacacggggaaggctaagcgcacgttttttagggtgagtttcattacggtgtctcctgagattgaggtgagggggcggtgtctttgggtggggggatgggcatgtcgctcaagtcctcgaaatccgtcgcgtcctgaagggcgagcggggggcgttgatccgacgtcgggacaacaacgggtgcccctgtcgccctatgaatgagcggctggagctgggtccattggctctccccgatgattccggcctggtggagtttctcggcgctcgtggggctgatgagggacacgtcgtgcaggtgagcgactccaatgcgcatctggatgagcgcgtcctcggcggcagtctcgtccacccaacggcgcggcccctgtcggccttggaccagcttgtatccaggcacggcgttccctgaacgcaattccgctgctgccttggcacggacagccttacaccaggactcaatcaactctgttgcaccaaacagggaggccaacgtggtgttgtcaaacgtgcgcagggccgcgtggctgagctgcggggccacgggctgggtgagatcaacaaaatcatccgcgaccgtggtcagtacgtgcgtggccaacgcagggcagctcgctttggccttgcaaaaccggcagggcgtttctgcggggccgaaatactccgaagataattcgcctacgttggtgtagtgcccaatcgcttccatacaccgcgtagcactgcgcttgacccgctgtttaaaatcctccatctcggggagggtgcgcacccactcatcactatgtccgagccgtggttgcacgatcactagccgcacctgctggaagtcttccacccatccaaattcactcagcgctgccagcgcatacagctgcaactgctcattaccttcggcgaagactttgacgcctttgccgtatttgagatcaacgatggtcaacgcatcccccgccaaaatcaccacatcagcggtgcctttagcgccttgctcccccgtgatggaggcaatgtgtaagggctgctcgaccaggcgtacccccgcaatggcgcgcacgtagtccacatactcctgcacggacgcggccatctctgcggtcacttcccaagtgcgaccgttgatctcatggcgttctcctacgtacgcgctggcatcggacccggtgcgtaatgcgttggcagccaccgtatgggccacggtgccttcatcggcaaatgggctagcgtcgtctttgcaggtgcgcgttaacggaacgcttgccggacagtgcagccagcgatgcgcactgcttggggatagcatggcgtgctggctcatggctcaccgtctgagggcacagcgtctaagggcaaaccgcgttcgtgggcgatgtaaaatccgttgatgtactccagcactttcggaaataactcctccggtatcttggacaacactttgacgccgaatgattccaaaacgtcgtaggcgtacttttcgccaatctccttagacagggccgttaacgcattcgccacctcagcatatccaggtgtgctcataacctcggttgccttcttagcagcagccggtttggcagcgcgctgcgtcttacccgcagcgggaggcgttgccgccgttggtttttcaggggcgctatcgctgcgcggtgtatcgtcaagcacaggttgcgcggggctgcacctgctgggcggcttaagcaccgccaaaacagcgtttaattgggcctggtcggtaatggtgacggtcatagggaacatgggtttttctctcgtgtgtgggttagctggtgctggtgcgttgtccgttgtcatcactgctcatcgctgcgctgctccagtgcctcacatacgtgctcgtagtcttctactagggcggtaagacgaaacaacaactcgctttctacaggcgtaaaacgctccacggcttgcgcggctgctaggacattcacaagttcgctatcactcatcgaacgcatgaacatttctgtcggcatgggggtcataggtgtttctcgtgtagggggtacttcgtttcgctgtgttgttcacttgcgccgcaggtgctaatcccgtggtccagcagttttgaatgtgcgatatgcagtgcgtcacgcacctcttcgtagtcttctagcaagacggcaaggcgtgctatcaactcggtttctaaaggggtgaaatgctccacgcctgttagtacttttaggttgttcgtaaagtcgttaaccctttccgaacgcatcggcgactctgtcggcacaaaagacgacatataaaaactccttcccgaaaaacgttcggggttagtgtttaattagggtttcagaaagcgttttagcggcgtcgtagtgcgcgcggcgcacgcggtaattggcgatgcgtagtgcgtttggcgttgctcgggtatcgcgcaaaataaagtgggctaaccaagggcgcgagctgtaatagtggcgcaatgcaatactctgctcctccgctttgcgataacgattcatgcatagtcctcctgcatgacaccgccgcgcatcgcgttaacgcattccgcttcttggcgcatggcttctttgacgtcttcctcagcgagaagctgcaattgctccagccgtacgcgttcttgcacttcggctaatgcatacagacgttttaatagatcgctgccgattaactgatccgaagggaaggtatataaatccgctaaagcacttcccatcgctttataatgctcagtagataatatatccgccgcccattcatcggcttccgctcgtttatctgggttatttaaatactcgtgaacccgcgcatcgacccgctcggcaaaatactctttaaaatcatcttccggtggttgtaaacgcggatcgctataactgctgtatccaataccagccattacgcacctacctttggcgtattggcggctttgtgtgccatatgggataggacggattcattaaagctgtataattcttcacacgcatcttttatctgcggatacagtggatgtgttggttctacacgtatatattcgtaccccatagacgtacgctgtatatcgccgtctggcctacctacaaaccatgagcgcaccaaaggactgaacttaacgtagtgagctgcaaaaactcgtatcgttccttctgaagaatttacacctggctctttaaggtaatcagtaatgcattgccgctcagcacctacagcgtcctggatgtaagtgtagtagaacagcggcgcttcttcaggcgtgttggcctgtacttctttggctaaggcactcatgcggccacctctttactaacggcagcttcagcggcttcgtatgtagctaaagcagcacgagcagcagcgaaagcagcatcacgcgcttcttcatctttagcggcgtcgtacgcagcacacgcttcttttttagcggcttcgagcgcagcacgagccgcattacgcttttcttgtcgctttttctccgatgcagcgagctgcgccgcagatcgattacgcaccgcctcaagggcagctttaacgtgcggatacagtggatgcgttgtggcgacagtgaacttatcgttgtcaaaataatccgtcatcacgtcggtgctgttgtacacctcaaaacaggtatgcactaaagggctaaagcgcgtgtaatgcgtggcgatgaccctaattgccgagttatccctgtcgtgcggcttttcgtaggagtaattggcgcgttgcaactccccgcctttcgcatcccgaatgccgttgaagtaaaacaacggcgctttttgagtccctgataaggcctggttagcctgaggctgggcttgctcactaatgattgatgccatttcgatatctcctggcccctgccgctgggtgcgggtgtcgtggggcgtgtttgggtgtgggtgttgagcgcggttatgcttggcgccatgaactggacgaatgggttaacacttgctttggcggtgcttggtgcgacgcttggcgtttttaacgcggtgtggatgattcgccgcgacactattcggctgaaggttacttgctggaactcgtatccagtcgccggaggcgcgccgttcgcatgtgtggaggtgataaacctgagttacttggcagtgacagcggcagcggttgtttttcaaaaagggcgcacagccgacaggagaacccccatcgtcggagactgccttgaccggagcaggctcccccgtcgaagtggactgtggtgatggccctagtggccatggtggcattggcggtgccgttggcccccttggtggcgctgagggagaggggtccttacgtgttatgaacacaacccatgcgttgactgcggtaataaacgcagctaagcagagtatgggaatttgggtgctgtctaacgacatctgatatctcctgcccctgccgccggttgcgggtgtcgtggggcgatgtggagatattacggaatcccgtttctgtttgtcaacggaattccgttaattatttgcgggaagtttgcacgccatgcaaaatatctgcccatccttacgtctacactttaaagacaccgccgcgcgtgtattagttaaccctttcaatcttatttattagatacaccttacctccaatgatcccttcttcggggaactcaaacgagggcatgaggtggttgtcactgacaacgaaaagtcttccccgatcttgtaagcgcttgatctgatgtccgtgccccacattcactaggtaaagtccatccccctcaaaagtatgcgttccggtgtctacaagtacgacctccccaggcgcaatagtgggggtcatggagtctcctttacccgtgacgagcactaaacgcccaggagggggcaggaatccaagcagcgagcgtagaaaggcttctgaatactcaacggtacggactatttccggaaagtcctcgttttcgcggccatcacccataccggcttcacccatctgctgtacacggacatagcccaaggagttattgctaataggggcgggaaacgtatccgtagatttctcaccacggccagtttcgagccattgagcagacacgccaagacgctcagcaatcttatgcaatgctgtagtcgatcttgagtgaccaagctctaaatctgaaagggttgatgtggcgataccggcgaactttgctaattcggtccgactaatgccttggttctcgcgctcagcgcgaattctgcttccaatcttcatgtcgtgcatttcaacggaattccataacggaatttcgttgacaccaccccacgggattccgtagtatgggcgcatgaacatctggcagaccaaaatctccaaactcgaagcttatggttttaccttgagcggaattgctcgagccatcgggatcgagccgcaaagtgtctccgatatcaagcacgggcgtacgaaggaaccacgggggatggccgccgtgaaactctaccaactccgccccgacatcttcggcgcttcccccacaggccacgtgcaggaggtgtccgatgcggcgtgaaggatttctcgatctatctgattccagcctggagccttcgttaggagggagcaacctacttattgtgagagtccccttcgccggtcctcccagcgtaccgacattcttttggacggaaatatccggaccagagaataaaaagttggcgtatatcaagtttgagcggcggcttttcataaggtcggaatcactgtttgtagccaccgaatggcgtccggcagattccggagacttgcctccagaaccttttctgcgattttctggataccagaagcagggagggatttaatttgttcaatgaccttccccttgacagtgttatccgcatcgcaatcgacgatccgttgcagcaacagatcacgcacggtgtcttgagtcagcctgacgttgaccactccaagaatggcggagagaccgccatctctgcgaggaagtcaatccctcgtggtgtcaatgtaatcatgaacgcccaatcatcactctcgttgatgcttgtgccttcacattcaatgagtccatgtccggcaaggtaatgcacctcggctcggataatgttcatgtcgaactcaggtgtattaatcgcattgatcgctgctggccacgggtaaacctcacgggcaagttcgagcaagcgacgttgtctattccgattaaatttatccatttattgccctccttgggggctgtcgaggtgtccgatgcagcctaaacctgagttttcaacttcttttctttcccgattaccaaaggtagtgcgtctctggtggtttcgattacacaagcaaccgcactgtgtggaatgtggaaaacggttggctgggtttgaatttctccgggcgggggttggccttctagaactactgaaaggtagtggttttccatgtccacgtgcgtgcaaatccaaaacgcgcggctgccaaaacggccatcttgggggcgaaatttcccgatgataaattggctcaaggctacattcgtatgcagtactacaacgaatactttttcttccatgccgatctccggtagtgatttggttgattggaaacaccaattctaccggcaggttggctccaacccgatttcgatgcgctgtcctcgatcttttcaatgacattgaataacccttggtaatgaatctatgtatgccgatccgacccacattcgtagtcacccggtgaaggtgcgttttaacgatgccgagcgcgaattgatcaatgcgttggctcaatacaacgggatgcaaccggcggcgttggttcgtgaattggcgttatcggtagccactgccgcgataaagaatgataagcggcaaacagacgcggcttgaagtgcctaaccaggccctttggaggccctgtggaaattgatctaagccctgctgatcgaaaaatgtttgagcaatacgcacaaagctatggactggcttgtgttgatgaagcggtagaacacgctgcaaaacaagcgctaaaggacgcttatctgttacgggccaagaatgggcattcgcctcttggaaaatgtgtggtgatccatttgaagggacttaaaaagccctcaaggaatcaagaatgaaagcaagcaatgacagcgtgagcttaacccgtatgaatgaccgtaagcggaaaggttgatatgtatatctcagtgaccccctttgatgaccctgtaggcagcctcgttggcgagggcaacaagcgccttattatcgatattgcggccggtcctccggcaccaggcaacgaagtcagcggatcgtatctcggccttgacggtcctgatgccctggtcattgaggcgtttgaagtgttgctccgcagcggcttcccattcagcgtacgtccgatgccaacggcgctcgggaaggatgggcttacggtagaacagggcgcgcaatgagtactggccgacagtcacggactgtgtcgtgagcttgaccactgcccacagctgcggtaccgtcgccggtaaggagatcaaaaactccggaatcagcggtacccgcatccgaaacccatgcggtttttttacgcctgcacgtttttacgtcgggagggcggtagcgatacaacaccctgcaaaggggaaagctgcccgccgtctgattccggtttttgacctcccgacacctacgggtgcggcgcgcaaaaacgtctccccgtggtcatcccatgaatcaggagacgttttatgacgcagttacctgctgccgtgtgtttttccggtaaatccctttccatcattgatcgtgacggtgttcctcacttgacggctgccgatctagcccgagcgcttggttacaaagacaccagcgctgtcttgcgcatctactcgcgccataccgacgagttcacctatcaaatgtccttggtggtcaatttgaccgtcaaggggtttggaagcggcaactctgaaaaacctgtccgactcttcagccctcgcggctgtcatctggtggcgatgtttgctcgtacttcagttgccgccgcgtttcgccgttgggtgctggatgtgttggaagtccttccctcgatccgcaagacggggagctataccgccacgggaacgctggtgaatgacgatgtgctctgcgccatctggattctgtgcagccaattcaagtcgctgcatgaaacggtattcaccaacaaggttccgcaagccctagcatggcttggggctaggcagatgagcggggcgctttacgaccgtctgctagatggcctgcacggcggcgttggccctatagaaaaagccctcggcccgcagatggaacaggctgcccaaaaggtcaggggggttacttatcgccgcttcagctaacacctgcggctgtctgtctggccgtactcctttaattagtaaggagtgaccctcgcattgctaaaccacccccgcagttaaaaaagggcgggctgagggggtgacctcaactcgccctgaataaaggaaaatagtgatgaagaatgattctatcacaatcctaaaacaccccgtcaatacccttgccaaaacatggtgcgctgatggcacggtgaaagcctacgacaacgccaagttctttgaggtggagcaacgaccgctcaacaatagccgcgagctgtctgccctgctcacggagctggagaataaccggcatgcctgcgtgattcgcggggcgtatgtgggcgatgccaaagccgctgcgcttgatactgagttccagaaggggaaagcacggcgcattgccgagctgtatgaggatatcccgcatcactggatgctcgttgagatcgataatttcgagccactgcgccgcgatccggtcaccgatccggtggggagcatcagcgagttcctccacgcacatctcccgttctggttcgcaggtgcggactaccattggcagttatccagtagcgcggggcggggcgagtgcgcagggaagctaaaggctcatgtatggttctggctacatacgccgtataccagcgcacagctcaaagcctgggccactgcctgcgctccagccctggacgcttctgtatttaatacggtgcaaatccactacaccgccgcccctgtgtttgaagccggtgtggccgatccggtgccagtgcgtagcggctttgtgaaaggccttcttgaggattctgtattgctggagattgatgcagagatattggaaagcgccaagagtgaaagcaaacccagccgccagcacaagctcatggctgcggcggccaacgaccctgtggctgtgcgccttgaagaacgcggaatgatcttatcgaccggtaaggcgggtgaactctttatcgaatgccccttggctacgcagcatacgcaagcctctaaccctacagccacggtgtattaccccgcacataccggaggctatgccaatggcgcgtttgtatgtcagcacgctcactgccgagggctgccacaaacggcgtttctacacgagataggaatctattccgatgaggaaatgctagccatgttcgaggacctcacggacgcgcctgccacgctcgccgttgagcggcacgacgtgcccgaagcgctgtacctgaccactgacaaagcgaacgcagtgcggattgccaagcactacggcaaacggatcatggtgtctgctgagcgctggttcgtctgggaaggcacccactgggcgcatgatacggatgcggcacgcctactaacgttaaaactctccaaaatcattcgtggcgaagtggagcaatggcgcaccaaacgcgccgacacagagaaggaaaaaagcaaaaacgcaaagatcgccgctgcgctggaggcatggggcaagaagtcggaaatgcgcagcactgtcgaggcggcgatggcgctggccaaaagtatgttggtcgtgaaagcggaacggctggacacggacccctggctattgaactgtgccaatggcacggtggacctgcgcaccggaacgctcaaagcgcaccgccccgaggactacatgacgcgcgtcgttcccgttaactacacgccggatgccgctgcacctgtgtttagaaagacactggcacgtattacctgcgaagaggggcaggcccagcagccactcagtgacttcctgcaacgctggttcggctactgtgccaccggctcggtgcgtgagcataagctggccgtgatgtacgggatgggtcgcaatgggaaaagtacgttactggacttaatctcgggggttcttggccgctatgcgggcgtggccgcccctgggctgttaatggatgccggtcacgaccggcaccctaccgagatcgccgacttggtaggacggcgcatggtaacggtgaatgaaaccagcgaaggcggcatcttgcgagaaggcttcgtgaagcaagccactggtggcgatatgctcaaggcgcgctatatgcgtgccgatttcttcgatttcccgcccacgcacaagctgcaactgctgactaaccataagcctgtcatcaaagggcaggacgtgggcatctggagtcgcctgatgctcattccgtttgaagcacgcttcggcactgctgaagaggtaaaggcgggggtcgcccaataccccatagaccataagatcactgagaagctggccgctgaacgagaaggcgtcttggcctggctcgtggcgggggcggtggaatggtacagggaggggctgaccccgcctgcgatcgtgcgggatgcttccaaggactatcagacggagcaggatcgcattgcccagttcattaaagatgagtgcgtgttagggatggagcacgaggagaagctaaccgcgccgatgggtggcggcttgtaccccgcgtatacgcaatggtgcaaagacagcggtgtttacgcgttgtccaaaacccgtttccttgacgaattgaaacggtgtgtgccgaaattcaggaagagagacgcgcaggaaacggttgcgggaggaaaacgccgtagagttttatcgatccaaggtatcgcgttgacggacgctgatacatagcgtcgggcctgctccgtttaagcgagatgaacccgcagattatgcgggtttgtctttttcgcctaggcgcagggtgcgtgtgtctggttcgggaggtgatacctctggtacctctgtttatactttttctactatccactcccaactcattgtatgaaaaatatacagcgtatagagagagaaagggtaaatcatgctttttcgggtaccagaggtatcagaggcgttgggaggtggtacctctggtacctctgtttatatttttcctattatccgtcccaactcattgtataaaaaatatacagcgtatatagagagaaataggaaatcgtactttttcgggtaccagaggtaccactcacaccctgcgcccgtacatctagccactgccacaccgacggaagaaagcgcctccgtctcgcttaacaagctgccccccgctcccatctagccctcgaaaacggcaactccgcgtgaacctatgttgatagtccgttttcgtttagtgaaaataacttttaaatcaacaacttgagaattttatgggcgaattgactggagtaaatgctgatttagcccagcttgttcggctggcgctcgccgagcagacggaggatgtgtatctcttcgctgcgcgactggtcaggaagtaccgggggactgagccggagttggctgagcgggtggcgctgcttcttcgtgccaacccgcatcgggcgggggcgctgctgcgcagatgaacgcgcccgatgctgttcggacgcggctcgaaggaccatcagacggagcaggaccgcattgccccgcccgcaccgtacatccagccactgcccctccgacgggagcaagcgccgccgcatcacccaataatattctttacaatcaatgggttatactagtccccatgcttttttgtgatgggtgagtggccaatgcaaacaacatgctttctgcaacgctccaatccgcctcgcttgctggcgcgtttgtccttggatgggaagccccgcgttgtgggatgtggggataccgtaggggtcggcgtgaggcccaccgtcgctaccaggttgcctgccagtgtgcaggagttggcggatatcatcggacgggagcaagcgttaaccctgattggtcagttgccgcgtacgtatcccaaaggccgccgcagtggcaaggtgattttgtatgtccctaaggttttgtcaccccatcaccgattggtatccattctgggatggggggatgcacaaaagctggtggatgttttcggtggggagattttgcagcccgccaattgcaattgcattgcccgccatgcgcgggattgtgcagttgtggggcttttgcgtcgtggtgtgcccttggatgtcattgccgcgatatttgggatcagtgtcaggcacgtcaggaatttcgctgggggtagtccctggcacccgtcacggaaaacctgtcacaggacgtgtgccgaggagacgcgcaggatgaccggcaatgaatgtctccgggacgtgtcatgcagaccattggtgaagaaggtattgcactgatcaagttttttgagggttgcaagttgaacccgtacacctgtcctggtggcgtgttgacgattggctatggcgagacgggcaagcatgtgacgcctgatatgtgtcttgccaatgagcaggaagccgatgcgatgttacgtgcacgcttagccaaagagtttgaaccggcggtgcggcgtgatgtgcgtgtgccactgaagcaacagcagttcgatgcgttggtatcgctgagcttcaacattggtgcgggggcgttccaccgctcgaccttgctaaagcggctcaatgccggtgatgtggctggtgcgttggagcaatttcatgtgtggaaatgggcgggcggtcgtatgcagtctggtttaatcatcagacgtgccgccgaacgtgcattgtttgaaggcagtgactggcgtgctgaagagaagcaacggcgtgctgctttaaagggtcgccgtgattgatccctcgagcatgatgtcctggtggaaagaagcgttttacacgtgccttgcgatggtggcagggatacttggctacctgatgcgttctctagacaacggtgagaaaccaacctgggcgcgtgtgctgatcgaagccagtgcggcggggctggtggggctgtttgcgatgtgggtgtgtgagtctctggagttaagccagcaactgacagccgtcactgtgggggtgtttggttggcttggagcctctgccagtttagacctaattcaaagcttcatagtccccaaagtggggggtgggagaaggagttcggatgatcgttaatacactgcgtcgcgtcgcaacacgtttgcccagtgtgcggctgttgattgagtacatgatgattggtgcgttggtggcgttggtcgcgcatgcggtgctggcgtggtccgagcgcagtcaattagcgcagcgggcggcgcagctggaaggccagttagcggcggtggagagtacgttggatgcgcaggtcgcgatcaacatggagcaagacgctgcaattggacggttacgcactttacgggagattgacagccgcgcgatgtcgggtttgcagtctgatctgaatcggatcacgttgcgcgaccgggcattgcggcagcgcatcacacatttggagcaacacagcgatgaggcgaaagcttttttggatatggatgtgcctgatgtacttgggtgcttgctcgacggcggttcctgtcaagccagtcaccctcacgcaaagccgcgttgaggtgatcatcccgccgcaggtgttgttgcagccgtgtgaggcgctggaattgccacgtgtagagaccgtccgcgatgtgttgaaccagacattgggatggcgttttgcctatgaacagtgtgcggcgcaagtgcgctgtgttgcggcatgggtgcaggcggcacggagggggcagccgtggttctcagatggctgcggaatggaagacagcgatacctcaccgtgaccatggtgtagtggcatctggtggatgtggaagcgtcaaatgagcgaatttagctgcaatttgacagattttcatgggtccttcctgatgggggaggcctgcggggtcgaaactccgcgaagcttccattgtgcgtggcattttaattctcacttgttgtttatatcgaccgatggttttacagaagcaacaaggaaaacaggttaatcgtgcaggcctttcggagatattcggtgtagcgttgccgacggtcgatcaatgggcacgtaacggctgcccggtcgtgaaacgcggtgggcgtgggcgggaatgggcgtttgacacggctgtagttgcccgctggttacgtgacaaagccgcagaagaagcggcgggtgaagcggtggccgatattgaagaatggaagcgccgcaagatcgccgctgaagcgcaacgtgaagagttgcacttggctgatgcaaaaaagcaggttgctcctttggagcaggtggaaaagacattggcccgcgtcttcgcggaagtgcgtgccaacctacgcactattccagggcggaccgtcgccctcctactgggtgaaaccgacgagcgccgctacaaacgcgtgctgctgcaagaaattgatcagaccttagaaaatctcgcgtccttggacctgacccaagaagacacggacgccgacgaagacgaggacgaggaaacaggcgatgtctgaaacctttggtttaaccgccctagaaaaccaagaaggcgtcgatcagatgatcagcaacgccttacagatgctgcgaccacccccagcaatgaagccttccgaatgggcacagacacgcatccgcattcctgaaggcaacgccattcctggccccttgcgcctcgacaacgccccctaccaacgcgaaccgatggatatgctggtggacccggactgctaccgcgtcaccctgaaatggggcgcacaagtcggtaaaaccatgctggccttatgcgtacaaggctactgcatcgaaatggccccccgcagccaaatgatgctgcaaccctcccaaggcgatttacaagcctggctagaaaccaaattctccccgctgattgcagccaaccaaggattgcaacacctcattgcaaaaccacgtggtcgcgatggcgtcaacaaccagcggatgaaatcctaccctggaggatttctgatgtttgcctggtcaggctccccaaagaccatgcgcgggcgctcagctccactgattgtgtgcgacgaaatcgacggctacgaacgcacggacgaaggccacccggtgagcttgttgtggcagcgcgccgcgacctttggcgatgaacggtttcttctggagatcagcacacccaccattgaaggtgccagctatatcgatgacgcctaccgggccggagaccagaggcgattttatgtacgctgccccgcctgcggatacgaacaaaccctagaatgggaacacgtcagctgggttggacgccaaagcgaccccgacgccgatttggccgctatcgacgcccatcaaccgcacactgcacgctacgtctgccaagggtgcggcgtatgctgggatgacggccaacgcattgcagccgttcgccaagcccgctggcaggccagcaaaccctttaacggccatgcctcctacgaactgaacgaactctactccaccttccgccgccaaagcgccatcgttcaagactacctggacaaactcaaacaccaggacctacaaacattcaccaacgtcagcctggcccgcgtatggagcgagaccgccgaacaggccgacattgacgacctactgcgccgccttgaaacctaccttgccgatgtccccatgggcggcgtctttctcactgcgggtattgacatgcaaaccgaccgccttgaagtggaaattgtcgcatggggcattgacgaagaatcctggtccatccataccgccgttctctacggcgatcccctcttaggcgacgtctgggacgcactggaccgctacctctctaccacctggcagcacgaaagcggcctacgtctatccatccaggctgcctgcttagataccggaggcacctccggctacacccaagccgcttaccaatacctgcgtaccaggacaggcagacgcctctttggcattaaaggcgttggcggctggggccgtcccatcgtagacaaagcacaacgcaaacattccggacgcaacgcccccagaatcaacctctttaccgttggcgtggacgaagcaaaattaattgtgatgcgccgccttgccatcacccagcccggcccaggctactcccatttccccgcagaccgttcccccgactggtttgcacaactgaccgctgagaaattgcgcacccgctacctcaaaggccagccagtacgccaatggaccaaacccgacaaaacccccaacgaagcattggattgccgcgtctacgcctacgccgccctcaaaatcatcaacccgcatctaccccatgaggccaagcgtatgaaggacgccgccgccttattgcccgaggaaaaaccgccacaggaccccaccccagaagtgcaacaccatacccctcatttccgcccccaacgcccccggcaccccttaaaaagccggagaacatgggctaacgactggtgacccatgacattccagcaccgctgcccaacattccctgccaagatcaatgctggatgctcattacagatcgcctttgcactcaaagactacccctggcccgactggacactccattgcctgctgcgtggtccggcatcactggacctcatcgcccagggtgaaaacaccacccaccgcttcgacatccccgctgcggacactgcacagtggacacccggcgattacgtctaccaactgcgtgcagcacacagtccccacaccatcgaactaaaacgtgggaaattccgtgtagaaccggactttgcatcgctgccccaaggctatgacgggcgcagcgacaaccaacgcgccttagatgccatcaacgccgtcctgcaaaaacgcgccacccaggaccaacagcgctaccgcatcaacaaccgcgaactgtggcgcacccccatcgccgaattactgaaactgcgcaccttctacgccgttgccgtacagcgcgaaacacccaccgataccccccgctgggggaacgtcgttcctgtgaggtttgtaggatgaacctctggacatggtggacacagcgcacagcccatccagatcaccccaccccagacaccgcaacaccccagccaaaccaccccccgcggcgctggtatcagcgcctgctgcccctaggcggcatgttcaaagccggacaagtggatgccaatgacctgtggagcagcatccccgtctccccggacgaatacatcacccaacgtcttccaatcctggtcgcgcgcatgcgcgaacaatggtccaacaacgaccatgtcaaacggtacattgacctatgccgccgtaacattgtgggtcctcgcggcatcgtcatgcaggcccaaagcagaaaatcgcgcagcggtgccctggacaccaccatcaacgacgccattgaaacctggtggcaagactggggccgcaaaggccattgtgacgtcaccggaaaattatcatggcgtgaaatccaaaccctctgcgtcgagacctgcgcccgtgatggagagtgtattgccagaaaaatttatggcacacacgccggaccgcatggcttttgcttacaactgattgaccccttgcgcctacccgtgcgctaccaaatgctgaaaaccgaccaaaccggcggatttgtccggcaaggcattgaatttaaccgattcggaaaaccactggcctatcacttcagctccattgacgaacgtgacacctactactacagcatcaatggacgaggctacgtccgcgtgcccgctgaggaagtcatccacattttcaaacccgtgatggtggggcaacgccgcggcctgccttgggccgccacctccctactgcgtctgcaccatttacaaggctttgaagaagccgccgtacaaaatgcacgcgccgccgcgagcaaaatgggctttattaaataccaggaaggttttggagcgcgagccgacgaacatgaaaacgttgcccaaacaatccagatgaacgccgggccactgtcgttccatgaattacccgcaggcggagatattcaagactggaatccgcaatacccctcaggggaatttggcttattcaccaaagccgccaaacaaagcttggccgcgggcatggatgtctcctaccacgccctctccggcgatctggcggacgtcaactactccagcatccgccaaggcacattggatgaacgcgaacgctggaaagaagaccagcaattttttatcgaatccctccacacccctgtttttgaagcggccttgaaagtggcattgctgagcggacagattcgcgtccatggcaaaccgctgcctgccgaacactacgaccgataccgccgcgtttcatggcaaggccgccgctgggcctgggttgacccccgcgccgacgttgaaagcgcactgacctgcatccgtggcggcctgacctccaccagccaagtgatcctggaacaaggccgcgacccccaggacgtctttcgcgaaatcgcccaggacctgaaagaaatgcaagcctccggcatccccaacgactacctcaagtacctgctgtatggcgcagacctcactgtcgccaacgccacaccgaccgagaaggaacccaccccccatgaacacagccactgaggtagtacgggaccttcgcaaaggcggcacccagtaccgccatgccgacgtcctgtcgatagacgcacccgccagaacccttgaacttgcatttagcagcgaatcagcagaagtaaagacatggtccggcgtggagattctcggccaccgccccggcgaagtgcgcctgcaccgtcttgacaacggtgccgccttactcctggaccacaacccgcgcgatcagattggcgttgtcgaatcggcctctattgacagcgaccaccgcggacgcgccatcgtgcgcttcgggcgcagcccacgtgctgaagaaatcttacgagatgtcctggacggcatccgtaaacacgtctcagtgggctatttggtgcatcaagtcgaagtgatcggccaacgcgacgggtgccccctataccgcgccacggactgggaacccattgaaatctccattgtcagcatccctgccgacccttccgtcggcatcgggcgcgccttggaaaatccgccacaggacacccccgccgccgcaccacacactccatgcacccctgaggaccaaaccatgacggaaccatcaccccccacccatgccgacaccaccagcacgccccagccgacatccaacgataccggcaccctcaacggcgtcgatgccgagcggacccgtgtcagacacattgcggaccttggcaaaacctacgggcacttggaactagcgcatgactacattacccaaggccactcaccggaagcattccagcgcgccttactgacaaaactgacggacaaagcatccatgcctcaatccgaaccacagaccgacactgacaccggcatcggcctgtccacacaagaaatacggcactacagcatcgtccgcgcggtccgcgcgttattgcctaatgccagccagaccgaccgcaacgcggcggccttcgagattgcctgctccgccgccgcagaaaaaacctacggcaaacaggcgcgcggcctgctgatcccctcggacgtcctgaaccgcgccttctccaccaccaccccgacggacggccccggcggcaacatcattgccaccgaactgcacgcctcctcctttatcgaaatcctgcgtaataaaacctgggtcatgcagcgcgctaccgtgatgggcggcctggtgggcaacgtcgatattcctaggcagaaaggcaccacccaagcctactgggtgggggagggcgactcaccggaaaaaagcaaacctgccctggaccaaatccacttcacccccaaatccctggccgcctataccgacatcacccggcgtctgctcttgcaatccaccccggatgccgaacaaatcgtccgcagcgacctcctgaacgtcatggccctggaagtggaccgtgccgccatctacggcagcggctcggatatgcaacccacaggcgttaaacaccacagcggcattaacgccgtgtcctttgcacaaaaagggcaacccacatttgctgaacttgtccagatggaaacgcaaattgcactgaacaacgcagatgtgaacgccatgtcctacgccttcaatgcagggatacgtggctatgccaaaacggccttgaagtttccccagaccgccgccagcggcacgatttgggaatccggcaacaccgtcaacggctaccccgccagcgtgtccaaccagattaaggccggtgatgtcttctttgggaactgggcggacctcatcattgccatgtggggaggcttagatatcaccgttgacccctacagcctcagcaccagcggcggcacccggattgtcgtgttccaagacgtcgactttaacatccgtcgtaccgaaagcttctgctacggcgcagccgcctgacccttaaggaacacaccatgtcgacgacgacaaacaccctcaaaatcagcgctgcggtggtgatccaaggcctgatttaccgccctggcacaatcgtccaggtccctacggcactggcgcacgatttaatgcgccgtggccgtgctgagcttgccggtgatgccgatggccccgtgggggtgatcatcgacccacccagcggcgaaacgcccacgcccaacacgttgacccgtacagaaaccaatgagaagccatcccaacgcggcggtcgccgttgatgcaccacccctgctgggacgatctagacgccttcctagaaaccgatgattttgccgtgacagcccagttgcactcggagaaaacggggcgcgtccatgaatgcaccattgtttttgacgcgacctacattgatgcggacatcggcgactacagaatgaacgccccggaaccctcctttacctgcaaagagaccgatgttatgggcttcaaaaaacatgactacgcccgcattgaagatcgccactaccgcctcacccacgacccacaaccggatggaaccggcatggccctcgtgcggctggccccgatggtgcccccatgattggcgtccacatccacacccatagcctcaccgccatcgcgcaagcactcaacgccacggaaacccagatgcaacaggccctacgttcggccagcatcaaaatggcggcctggctgcgtacccgctccgtgcgtgggctgagcgatgcattgcaactccaacaaaagatcgtgcgccgccgcctgcgcacctatcgacaacgcgaccagatgaaagtgtggtacggcctgaaccccgtccccttgctatggctgaaccccaaagccaccgctagcggcgtcagcgcccttggcggacgtcagatcaaaggcgcattcattgccacagtgcgcggcaaacggcaggtactcaaacgcctgggccgcgcccgctaccccgtggccgttcaaacagcggacatttacgccccctccatcacctatattgaaaacggccttcttgacacagcctcctttgaagcacgcttttacaccctgtttgagcacgaactgcaatggcggacacgcacaccgacataagcctagacgccctgcataccgccatccgcgaccaaattgcagcgcaattcccagacctggccaccgtgaccttttaccaggacgatgaagaccaccaattgcccatgcccgcctgtttactgaccctgagcgagatcgaacccgcccccgaaaacgatgcaggcaccggacaattccccgccctgctgcgctttcaggcacggcttgtcctagggcaccgcggccccaccacccacctacaagcacgtctggccgccgccgccctgggcacctggctgtaccagcgccgctggcgtggcgtaccgaccgatccgtgccgcgtgattgccatctacccagacgaattcaacgccgaattagatcgatacgtcgtctggaccgtggaatggcagcagcccgtctttcttggtaacagcgcctggacccatgcaggcaccctgcccacccacctatggctgtccttcacaccgcagaccggcccctccttccaagacaactacaaccagatcgccccgtgagacagacactcaacgaacacacccgccaattagcgcacctgatccttcaagggaccgtcgccgcactggaccctgccactgcctgcgtgcggattgaagccggagaactgctcactggctggctgcctgtgatggcctcacgtgccggagccgaccgctcctggtggctgccgcacctgggcgaacaagtcattgcactgtgccccaatggggattcagcactgggcatcgtcttgcctggcagcctctaccaagagaccttccccgcacccagcagcaccgcccaccagccctgcctgttgtttggcgacggaacacgcatcacctacgaccgccaagcccacgccctgaccgtggatgcctccgccgcatccggcaccgtcaccctgatctgcgccaccgccaccctcaccgctagcgaccgcctcaccttggacacacccagcctccacctcaccggcaacctcaccgtagacggcaccattcacgcacaaggcgacatcaccgccgcaggcattggcctacaacgtcaccaccatacggcccaaggacccaatgcacccaccaccccagcgcaggggtaggcggttacacatgaaggcgtgtgatcttcgggcgtggctgctgactggcaacccacaggtcatacttgaactgcatggctacccacatctctgcactggtgccaagcgcatcttccaggcgtagggccatatcggcagagatgccgttggcaccattgagaatacgcgacaaagcgacacggctgacgccaagctttgcagccgcattggtcacagtgagatcaccaagatactcacgcaacacttcacctggatgtgcgggattgtgcatacgtttcatcgtgtgtttcctagtggtaatcctgatagtcgaccaagattgcgtcttcgccttcaaaagcaaacgtgaggcgatagttgccatttacccagatggaccaatgaccttttaagtcagcgccttttagtgagtgcagtttccagcctggagcattcatatctttggggtgcttagcactctccaacgcggtgagctggatacgcagtttggcggcgtgtttggtttggataccagcggttgatccctcgaggaagaattgttgaatgcctttgtggcggaaacttttgatcacaaagccgattgtataccgtaaatgatcggtatacatccagcggcagctatagccagtcgaacccacattaaaccattgagcaaatgccccatatcctgtcggaaaaactcctgatcatgcgttgcatatatcggtaaccgataaaagaaacgctaaggaaaacccgccacaggacaccgcccggtgagtccccccaagctgctgagtatgcgcggaatgaacatgcacaccggaaagccgcttgatggcatcgaccacctgcgccaatcggtgcagaacatcttgagcacccccttggggagccggatcatgcgccgtgattacggcagcaggctaccgcacctgcttgacgccccgatcacccgcgccctagaaatggaactgtacgcggccaccgcacaagcccttgccgcccacgaaccacggatcagactgcgccaagtgacggcccgcgccaccgcatcgggcacggtcatcctggacctgatcgcccagtacctgcctgcgggcaaaaccgtcaccctggacggcatccaggtgcgctgatggataacaccctgaccgccattgatatctccaagctgcccatgccggatgttatccggcaagtggccgcagacgtgattttgcaagaaatgctggctgatctggcggcacgtgatccgaccctgaaagacctcctgccctcagaccccatctacaccctgctggaagtggccgcctaccgcgaagccgtgcgccgctaccaaagcaacgaagatgccaaagccgtgatggtggccttggccagcgatgccgacctggacaatttagccgcattattccgcgtcaagcgcctcatgctggatgcaggtgacccctctaagggcattgccccgacgatggagagtgatgccgccttccggcggcgtatcgtccttgcaccggaaggctacagcgtcgccggtccagaaggcgcttacatctaccatgccatcagcgcccatgccgacgtgcgtgacgtcagtgccaccagtccaacccctggggacgtcatcatcaccgtgctatcacgcagcgccaacggacagccttcacaagacgtacttgacgccgtgatggcggcggttaaccaagaatcagtacgaccgatgaccgatcatgtcaccgtacaaccggcacagatcactgactaccaagtccacgcacgattgcacacctacgccggaccggatgcagcggtcgtcctgtccgaagcacagcgccgcatcactgcctacaccacagacgcattccgcttaggccgtgatattgccatcagtggcctgtatgccggactgcatgttgaaggcattcaacgcgtagaactgctcacaccacaacagggactgacgatggaccgtacccaggcggcccgctgcaccaacatcaccgtcgtgcatgggggtgtggatgaatgaccctctgcacagcctgctgccccccacggccacgccgctcatgcgcaccctggagcaggtgatggcacgcctggccgacatcccgattccattcaaacaactatgggacccgcacacgtgccccgagccattgctcccctggctggcctggtcattgtccgtggacacctggcgcagcacgtggcccgtgcatatcaaacgcgcgcgtattgcggcggccatcgagattcagcgttgtaaaggcagcgtcaaaagtgtgcgcgatgtggtgcgcagctttggcggggatgtcctcatcaccgagtggtggcaacaaaacccacccgccgcaccgcacaccttcacactgctgcttaccttatcagggcagggcggtagtcagacaactgccgaatttgttgcagatgtcattacagaagtgatccgcaccaaacccgttcgcagccatttcacctttacccaaggcgtgcacaccatcggacagattggcctgctgggtggcgcacagatcaccgcgtaccgacgcttacaccttgcacaggccacatgaggatgccatgaccccactccagatcaccatcaccccacagggccgcgccgccctggtgaacgccgagcatcatggcaccgtcccggtgcggctggcttctgtcggcctgaccgcgcaacactttgaccccgccgcggcaacgatgcctgaggaatccaaacgcctaaccaccttctccggtggcgtggtggccgcagacactattcacatcaccatccgcgatgcaaccgccgaccagtacgacatccgcggctttggtgtctacctggaggatggcaccttatttgccacctactcccaacaggacatcattctcagtaaatccgcatcggccatgctcctgctggcgattgatgttcggtttgtggataccgatgcgactcaactctcttcggtgacacctcctggaacaaccctccggcgacacagacagtggcaggcgtccttaccttgtccagcaacgcccaagccatcgcgggcctggaggatcgcagcgccgtagcgcctgccacattgaaagccaccctggatcaccgcctaggcgaagccgccccttccgactacgctaaaacactgatggccagcgccgatgcgcccgccctccgtcaccttctaggcctgggcgatgctgccgtgatggacaccggatcagaaaaaggattggatgcagatttactcgacggctatcacggcacctactacctgcaatggagaaacctccagaacaccccacagacctatccgcccagcccccaccagcacgccagcagcgacctccctgagctggcctcacacctagatactctggtgaaaaaaacgggcagcctcatgaccggctcgctccagtcccaaggcaccttgattggagacgcactgggtaacggacgcattccggcactgaaaatcggtaacgattgcgaattctgggacaacaatatcccctacgcggccaccttccgcagcggcacctccccagccatcgcacaactgttctttggcaccagcaaccattgctatttcggcaccagcaccaaaaacaccagcacagtgattggtgccaaaacgggcttactgtggattgaaacggcaggcaattacttctatcaacaacacgacacgacccacgttgccttttacaaaaagaacggaggtcacgcctttttctggagacgcagcgacagcggcggcagcggcggtaccaatgaagcgcaactgatggcactggaagacaatggcaatctatccgtgaaaggcactatcgtctcggcaggcggctacgcccaaggctcctcccgaaaactcaaagacattgaaggccccctgccgtatggcctggcagagattgaacaactgacccccctgattggacgctacaaaccggcctacacccccgacggacgccgccgcctatttttagaggcagaacaactactcgagctgatgccggaaacggtcaaccctgaaggtgttcacttccagggtgcttacgtcccctcggtcaacctggaccaactcctgcccgtgctggtgaatgccattgcacagctgtccgccaaagtgaacgcactgaccggcgcgtcacaccccacggaaaaatagccacaggacagcaaacagctgtcgcaccgatcatctccccgtcttacagcagatgaggggcctgatggcggaacactatctacatggcgttgaagtgctggagatcgacgatggcgcacgcgtgatccaaacggcctcgagcagcgtcattggcctggtgggcactgcgcctctggccgacgccaccatctatcccctcaacacccccgtgctgatcccaggatcaaccgcgatggcagccacactagggacagcaggcaccttgccccaggccatggacagcatttttgatcagattggcgcagccgtgattgtggtgcgtattgaagatagcgttaatgacaccgagcggctgtctcatgccgtcggtggcatccacgccgccaccggcacctatgaaggcgtccatgcgctgctggctgccgaaaacatcaccggctacaaaccgcgcctgctgattgctccaggcttgacccaccagcgcccagaacagacacaggccaaccccgttgtgtccgaattgatcggcattgccgagcgactgcgtgccatcatcattgctgacggcccgggcaccactgatgcacaggccattgcttatgccggggactttggcagcaaacgcgtgtttctggtcgatccgcggatcaccacactaggacccgatggcaccaccatcaccgcctacagcagcgctgcggtggccggactcatcgccaagatagataaccgcaatggctggtggtggtccccctccaatcaccccatcaacggcattcttggcacctcacgccccattgatttcgcattgggcgatgccaccagccgcgccaatctgctcaatgaaaaaaagattgccaccatcattcgtcatgacggctaccgattatggggaaaccgcaccttatccagcgatcccaagtggacctacctctgcgtggtccgcatcgccgatatcatcgccgatagcttacaagcggcccatctgtgggcggtggatcgctccattaccaaaacatacgccagtgatgttgaggaaggcgtcaatgcctatctgcgacgactgaaaagcctgggcgcgattattaatggccgatgctgggccgatccggaactcaatacaaaagacgccatcaccgccgggcacgtctattttaatttcgacttcacccccgcctatcccgccgaacacatcaccttccgtagtcggctcaccagtgattatcttgtggaggtgttctaatgtccgcaccgcgtcatctcctcaaacacctcaacctgtttattgatggcaaaggctatgcagggcaggtcgaagacatcaacctgcccaaattgaccttaaaaaccgaagagttccggggtggcggcatgctggcccctgtggaactcacgatgggcatggagaagctcgaaaccgatgtcagcttgatctgctacagcagcgacgcactcctgctgttcggcgtcaccgaaggaaagcaggtgaactgcaccgtgcgtggctttctggaatccttcgatgggacgacaacaacccttgcgatccatctgcgcggcaaagtcaaagaaatcgatcgcggcacctggaaaccggctgataaatccaccctaaaactggcgttggcactgagctactacaaagaagtacacaacgccaccgtcattcatgaaatcgacgtagaaaacatgatcttccagcaaaacggcattgatctgctcgcccccgctcgcaacgcactaggactctaaccatgaccggaccgaccactgatacaccgtacctccgcgaagcagaaggcggcgtacgcatcaccttcgcctcacccgtcagcatcaatggcaccaccgtcaatgaactatggatgcgcgaaccgaccgcaggggatatgaaacgctcctttgcactcccaggcaacgaaggcgaacgcgaattgcgcatcttctccaaccttctggaagtggcccccgaagccttagaaaccttcagcctgcgtaactacaaacgattacaggaggcctttctgatttttatcgagtgaggctaacgctggaggaactccgccaaggcgttctggccttagcctcgcatacaggatggtcgctcgtggacattctcgcgctcccaacgcgtgaattcctattctggatcgacggattaccgcgcgatggctaacaaaaaacaattccacgcaagcctgatcattgctgggcacctgtccagcacattaaaaagcgccttcgggtccacacagcgcaacgtacaacggattggcgcggcggtcaccacactctcgcggcagcaacgtctgctcgggcaaggcattcacacctttgggcgcatggggcgcaatgtcgatggactgcgcacccggtatgcggcattaaccagacaattagaacgcacccgcgccgcgcaacagcggctcaaccaagcacaagccgcacttcaagcaaatcgcgcccacctttcgcagacgcgcggacagctcgggggggctgtagggaccttgggggccgtctcggctgccgcgttttttcccatcaaggcggcggttgagtttgaaaccgccatgcttggcattgtcaagcaagtcgatggcgcacgcgaccctaccggcaagttgacctgcgtgtatgaggacatgggcaacgccatccagcagctcgcgcgtacgatcccgatggccaccaatgaactggccgacatggtgaccgccggtgcccgtatgggcattgccgaaggcatgaacccggaacaggcaagaaaaacactgatcgaatttacccgcgtctcggccatggcggccaccgcctttgagatgcctgctgatgaattggccgataacatggggaaaatcgctggcatttttaaaatcccgatcagcgacattgagcgtttgggcgacgccatcaactacctagatgacaacgccatctctaaaggtggcgacatcatcaaagtgatgcagggtgacctggccggagcggcctccaccatgggcttatccgccaaaaatgcggcggcgctggcgtctaccttcctcaccctgggcgaatccgccgaacgcgctgacaccgccgcctctggactgctacggcaattacaaattgccaaaatgaaccccaaacgcttccagatcggcgtggatatgttgggcatgaccgctgaccagcttcaaaaaggcatggtcaccgatcctcagtcgatgattctggacgtcctcacacgcattaaaaagctgccgatcgaacagcaaatggaggccgttacacgcctgttcggcaaagactggggcggtgccattgccaagctggctaacggtgtggatgaataccgccgccaactggcgcttgccaatggcgaagcggccaaaggcagcatgtcgcgggaattccaagccagacagcgcaccacagccgcgcagtggcagatcactaaaaatcgcctcaccgagctttccgtagccattggtaacgccttactgcctgctatcaacgacctgttagcgtcctcggctccggtcattgagcgatttgcagcatgggcacaacaacatcccggcgtagtgaaagcggtgctgggaaccgccctggccctggccggtttcagagtcgccgtcatcgccctgcgctttgcctttgccgcccttcactatcccctgttgctcggactacgcctgatcgcctcatggcgggctgtgggcaccttggcgtctatggcccaagtacgcaccgcagcgctggccgtggggcgcgtgctaggccgcctgttacctgtagcgtttatggccgctggccgcgcggcactgtggatgggccgggcgttgctcatgaatccggtgggactggccgtcaccgcgattgcttcaggtgcgttgctgatcatccaacactggaacaccatcaaaccgttcatgaccaccctatgggaagaggtcaaaacgatcttcagcggtgcctggaatgggattacaggcctttttaccggcaacttcgaccgtgtgaaaaacggattcaaaaccatgtttgatggcgtcggcaccatcgctacagccttcttcgacaaactcaaatcactatggaattgggccaccgaaaagttcaccacaatgaaacaatggttaggcatcggcgacagcctgacccaacacaccattgctaccgcaggtgcaggcgcagcccccacagcaacggtgcgcatgccaccattggcgcaacagcataggacaaataacgcggattaccgtagctaccccacctacaacatcacccaacaaccgggcgaacgtggcgaaaccctagcacgccgcattgccgcgcaatccaacccatcacagaggccaccacgcagcgccctgtacgacgatgccagaggccgagaatgatccgtcacaccctgtggaacactgtcgccgcccccctgcaaaacgcattccaaaccaacaccagcggcaaccggcctgtcctgatgatgctaggcggctacaccttctcactggctagcctcgtctaccaagaactcgcccgcgtgaacgaataccgctgggccgccatcgaacgctatgggcagcgcgatgcgcgccaatacaccggcccaggggaggaaagtatcgagttgcccggtattgcctacccagattggcaaggccaacgcgcctcattggacgaattacgcgccttggccgcccagggcaaccccttacagctcattgatagcaatggcgtcatccacggctggtatgtcatcgaacgcattgaagaacgccaaagcaaccatcaccccaacggcacaccacggcgcattgaattcacactcgccttacaacgcgtcaacgacgaccaggccgtagaggccaccccgtgagcctgcacatctatcgcacacgccacggtgacaccgtcgattggctcgcatggaagtattacgcacgcaccgataccgccatcatctcggcgatctatgaagcaaaccacggcttagccgcctgggggcccgtgctgccagaagccatcgcgatcaccttgccagaccctgcggccacaccgcacacccttccaggagtcgcattgtgggagtgacgccctcctaccggctcatcgccaacgacaacgatattaccgccctcatcaccgcacgcatggcaagcctacagctgtccgatgagtccggaagtcatgctgataccttggaagtggtcctggctgatcatctgcctaacgccccgctcaagctgccaccgatgggtgcagaactggaactggcattaggctacgacggccaattacgcccgatgggcgtttttgtgtgtagcgaaatccaattgtccggatggcccgccacaatgaccctgcgcgcccacgctgccccctgggaaggcacccctaaaggcaaaagcgacctgcaaacccaaaaaacccgctcctggcctgccggaaccacactcggtgccatgctgtccacaatggctgccgaacatggcatgacctccgcgatctccccgtcactatcaggcgtggcattaccacacattgatcagacagaagaatcagatatcaacgtcctgctacggctagcacagcggtacgatgcgattgctaaacctgccggaggccgactgatttttgccaaacgcggtgagtctaaaagcgtcacaggcattgatatgccacgcatccccttgacacctgatgagattgcctcctggcaaatgacctacgcaacgcgggacagccccggcacagtggttgccttctaccgtctggcacgccgcgctgaactgcatcaagtcagcgtcggcgacgggcatcccgttcaccgcatcaaacagtacttacctgatgccgccgccgccatcgctgccgcccgtggagaactctcacgccgcgcccgcgctgaaaccaaactcactctagagatggcagggcgtgcggagctgtccgcagaagccgtcttgacactcaacggctggcgggaaggagttaatggcgattggctcgtcacccgtgtgcaacattgcctagacaaaaacggctaccggtgcagcgtcgaagccgagcggcccaacagccatccggatgttgctgccgccatcaacacacaagtgcgcgatcacgtcgtacgcccctccagcacccatcatcagaaaacatagggacctactatcagtttcgcattttctgatacctcaatgcggcattctctgataccaccgtcccgcttcatgaggcatcttaatccttgccggacgcggggccattgaggccgctccacccgcgtggcgctgctccagcgccttttccggcaccttatccactttgattaacgaaacattttgcgcagcaatcccgataaacgaaactctatctacttgatattgcggttattgatgaattggccgtgagtttcacggttaaagttcaaagacagaaagcccgatatctgctccgcaatttctcatccccatcaaaaaccccctgaaaataacaattagtaattttactcattgcggagtggaaattaatataagagattgattttcaacaataaatatatacagtattggtgtatttcctggtcttgtttacgggcttggccggataacaatggaaggtgtgtcatcgtgcggtggtgtgttgcttttctaaagtcgcgatgttcgctgctgtaaatctattccgagtggtttcagaggggtttagggtggccctattgttagtatcctgtcattgtccaagcgtagcgagtaaccctgcttgtgattctttttagggaagctccatttgaaatggtgttgcttaaatttttggctaaatttgagagagtccctagggatttcaccttgctggtggcttacattgatctggtgcgagtccttgatcaaaataaatggttcgatggccgtgattagaattggcagagataccttatctgcccgaatttgatttaacatgttgctatcttcctcattaaatctacgaaggctgtcaccctggtgcatgatccgaatgcgcagtatggctattgctgttgccagtgcttggtgatgatgaaggtcctggtgaatgagcaaggcgccctcctggcgctttttttgttgcttcgcgggaagctcaagattgcattgctgaatgtttgcattgatgcgtcggcattagcatcattgcctgatcctgcttagcagaattcaacaacaatgatccctaaatactcaatatatcaatcgctgacacgccttttatactcatgattacgattacgctcccagacggcagtcgccgtgaatttgaaggtcccgttagcgttatgcaggttgctcatgcaatcggtccgggcttggccaaggccaccattgccgggcagattgatgggggacacttagtggatgcgagtgatctcattgagcatgacgccatgctgcgaatcatcactcctgaggatcaagaagctctggacatcatacgtcactcttgtgctcacttggttggccatgcggtcaagcagttgtatcccgaagccaaaatggtgattggtccagtgattgctgatggcttctactacgatatttactccaagcgtccgttcacccctgaagatttggctgcgattgagcagcgtatggttgagttgattgcccaggattaccatgtggtcaaacacatcactgcacgtcacgatgtcgtgcgcttgttcaaagagcgtggagaggattacaaactgcgtctcatcgaagagatggggcctgaagttactgcgatggggatttaccatcatcaagaatatgtagatatgtgccgcggcccgcacgtgccgaatacgcgtttcttgaaggctttcaaactgacacgcatttctggtgcttactggcgtggtgacacaaagaatgagcagttgcagcgcatctatggcactgcgtgggccgacaagaagcaacttgaagcccatatgcaacggttacaggatgctgaaaagcgagatcaccgcaagataggtaaggtgcaggatttattccacctccaggaagaagggccaggcttggtgttctggcatccgaaaggctgggtgatctggcagacaatcgagaattacatccgtcgagtctatcgcaacagcggctatggtgagttgcgttgcccgcaaattttggatgtgtcgttgtggcaaaagtctggtcactgggacaattacaaagaaaacatgttttttactgattcggagaagcgtacctacgcagttaaaccgatgaattgtcctggccatgttcaagtgttcaatcagggcttacatagctaccgtgatttgccgatccgctacggcgagttcggtgcttgccatcgtaatgaaccatccggtgcgttacatggcttgttgcgtgtgcgtggcttcacccaggatgacggccacatattctgtaccgaggcacagattgaatccgaggtcacggcattccaccgtcaagcgttgcaggtctatgcagactttggtttcgaggacattcagatcaaaattgccttgcgtccagataagcgtctaggggactccctgagttgggacaaagcggaagctgcgttgcgtgctgctctgagtgcctgtgaggtggagtggcaagagctgcctggcgaaggggcgttctacggtccgaagatcgaatatcatctgaaagacgcgattggccgcacttggcagttgggcacgatccaggttgatttcatgatgccaggtcgtctcggcgcagagtatgtagacgagcgcagccagcgctgtcacccggtcatgttgcaccgggcaatcgtgggttcgatggaacgtttcatcggtattttgattgaacactacgctggaatttggcctacttggcttgcgcctgtccaggtagtcgtcgctaatattactgatgctcagtatgaatacgcagagcgggtccacaaagcccttttaaatcaaggtttccgggtcaacaccgatttgcgaaatgagaaaatcggctataagattcgcgaacatacactgcaacgcgtcccttaccttttggttgttggtgaccgtgaaaaggagaatggcactgttgctgtacgcacgtgttccagagaggatttgggggcgatgtcgatttctgccttcgttgagcgtttgcaggcagagcaagtggtgtgagccaaccctggctagtctagagatatgatctggacggcgccgatttgatttccttggagattgcaatatcagtacctctgacaacaaacagaaccgtaagaaccatgaaatccgggtgccgcgtgtccgcgtgattggtagtgacggagaaatggttggcgtgttgtcgcgtgacgaagcgcttgccatggccgaaaaagaaggattggatctggtcgagatacagcctcaagctgatccgccggtttgtaaggttatgaactttggcaagttcaagttcgagcaacaaaagaaggcgaacgaagccaaaaagaagactaaacaagtcgagatcaaggaacttaagttccgcccggtcacggacgaaggtgactaccagatcaagctgcgtaacatgcgtcgttttctggaagagggcgataaagttaagattaacattcgcttccgtggccgtgagatgagccatcaagaattaggtcggcagatggcaacgcgtattgaaatggatcttggtgatgatgttgttattgaatcccgtccccgcttagaggggcgacagatggtgatgatggttgcgccgaggaaaaaaagctaagacgtctttcatttaattttttatttttgtaccgaagcatcttatttacaaaaggttttatctcctggcatactagcagaccagcttcttggagctggtttctatgtggtgaagttgggaaccctccttggcttttaagtcaaggatttactagcagtctagggcttaaatggatttggcttaaatggattttaggaaaagtgcagtacacgttactgccgccctgggcagtgataaacatccttacaaggacattcgcaatgcccaagataaaaactaaccgggcggcggccaagcgtttccgcaagactgcctctggaaaatataaggctggacacgctaatcgcagccatattcttactaagaaagcgactaagcggaaacgtaacctccggcaacagaaccatgttcgtgctgaagatgcgggtcgcttggaccgcatgttgccctacctctgaggattaagtcatggcacgagttaagcgtggcgtgcaggcacgccgccgtcataagaaaatcctgagtctagcgaagggttattacaatgctcgccgcaaggtgtttcgcgttgccaagcaggctgttatcaaagcgcagcagtatgcttatattggccgcaaacagaaaaagcgtaatttccgatctctatggatcgtccgtattaatgcggcggctcgtattaatgggctgagttacagccgtttcatgaatggcctcttgaagtgcggtattaccttggaccgtaaggtgcttgctgacattgctgtgcatgatcctgctggttttacggcccttgctgaaaaggcgaaaagtatacttgcggcataacgcatgatgcgaagggctttacggaatatgcattgcagcatttgtgtttgtgtattcccaatagttgcttatcgctttataaataacatgtcatctgttttactcgggttatttatttaaagagcagtacttattaaagccatgtagggaagggtgtaagtccttcccacattgcgttttagagttgagtgagtatgcgataacatcattccagcgtcgcgcggaatgcaaaccgcctagcatacgacgacaggatgagtagctgaagcgtatggtaatcaatgacattgaatccctgacagaccaagcattggctgacgtggcggccgcgcagaacttagatcatttggaagttttgcgcgtagcgcttcttggtaaaaatggcagcatcaccttgcagctcaagcaacttggtaaattgccagttgagcagcgtaaggcgattggcgaaaaggtcaactgcgtccgggatcttatctcggtggcattaatggatcgcaaagctgcgttggaaagtgcagcgttgagcaagcgcctcattgatgagcgcgttgatgtcaccctcccagggcgccgaggtgaacgaggaggcttgcatccagtcacccgtactttggagcgtattaccgagatttttgcccggctgggttacgagctggttgaaggtccggaaattgaggacgactggcataattttgaggcgctgaacttcccattgcaccatccagcgcgtgctatgcatgacaccttttattttggtgacggtcgtttgctacggactcatacttctggtgtacaggtgcgttacatgagtgaccaccggccgccgctgcgtatgatcgctgctggcaaggtttatcgcagtgatagtgatcagacgcactcgccaatgttccatcagatagaaggattattgattgacaagcatgccacttttgttcacttgaaagggaccttgtccgagttcttgagagcgttttttgagcgtgattttgaggtgcgttttcgcccaagttatttcccgtttgtcgaaccgggtgcggaagttgatattgcttggcaacagtccgacagcagcgttcgatggctggaggtgctgggttgcggcatggtacatccgaacgtgctgaagaatgttggcattgattcggaatgctatacaggctttgcctttggactaggtgtggaacgttttgcgatgctgcgttacggcgtcgacgacttacgtgcttttttcgagaatgatgtgagatttttacgccagttttcttgaaactgctggcttaccctgatcttgctagattctgatggtgttgagcctgttttgctctttttccgtttccagatccgactctcatgaaattcagcgaaaattggttgcgcaatcatgttcctatccaagccaatcgtgacgtgcttgtagcgaccttgaccgcgataggccttgaagttgaaaacgtggcagtgctaggtgaagctctggacttgatcgtagtggcgcgcatcgtcaatgtcgtgcctcatcccgaatctgatcgcttacaaatctgtcaagtcgatgctgctcaagatacccttttacagattgtctgcggcgcctcaaacgtgcgtcctggcttggtggtcccattggcgttgcttggtgccaagatcggtgcactgacgatcaagtccaccacactgcgtggtgtcgaatctaatggcatgttgtgctcagccaaagaacttggcttggatacagaggcgtccggtctgatggaactcccggatgatgcaccgattggcacaccattagccgattatcttgctttgcccgatgccagtattgaaatcaaattgaccccgaaccgcgctgattgcttcagcgtgcgcggcattgctttcgacgtcgctgcggcctgtgccagcgaagtgaccccgttgcatattgacgagatccccgctgtttctgcgcgtaccctgccggttgaattacatgctggtgccaatgccccacgctattgtggctgtgtgattgagggtatcgaccctgccgcccctactccggtgtggatggccgagcgcctgcgtcgcagcggtattcgtccggtgtcattgctggttgatatcacccagtacgtcatgttggaactggggcagccgatgcatgctttcgacgtggataccctacgcggccccattggtgtacgtctctcccgcaatgatgaagccttgaagcttctcgacggacgtacagttgtgcttgataacgatttcctagttgtgactgatgccgatcaacccattgcactggctggtttgatcggcggttgggaaacacgcataacagataccactgtcaacgtctttcttgaggctgctcactttgcaccggttgcgatcatgggacgtggccgtaaacttggcctgcataccgatgccagccaccgcttcgagcgcggcgtagatccagctttacccccgcaagcgatcgcttttgccacccgtctcatactggaacttgctggtggcaagccagggtcattgattcgcgttgaattgccggagtatttaccggcaccggcttcgatcttgctgcgtcgcacacgtatcgcgcgcctccttggcattgtcattgatgatgtcgaggtggagcgtattttgcatgccctggggatgcaggtaacgactcaagccgaaggttggcgcgttgttgcaccaagccgccgttttgatattgcgattgaagaagatctgatcgaagagctggtacgtatccgtggttacgaacatctaccaaccgccttgccgattggagcgagtcatatcgcaatgcccagtgaaacccgactcgatatgaccagcgtgcgtcgacaattgattgcacgtgaattacaggaaaccatcaactacgccttcattgatgctgagctactgcgccgttggcaattgaatactggtcaagtcatgctgatgaatcctctgagcgcggagttggcagtgatacgaccacgcttgttaccaggcttggtggcagccttggggcgcaacatcgcccgtcagctggagcgcgtgcgcttgtttgaactgggcaatgtatttactgcatctgatgaggcaggggcagcaccccttgaaacccaacacgttgctgctgccgtatgtggcgatgcgttcgccttgcagtggggtgaacaggcgcgtaaggtcgatttctacgatctgaaaggggacttggaatccctagctgcggccagcggtgcagtcttgaccttccattcctcagcacagccatggggccatccgggccgctcagccgacgtttggtgtgatgacacgtgtatcggctggattggacaattgcatccggcacttacccaaacactagaaatcaacgtggatgtgatcgccttcgaactggctttggaaccgctagtgcgcggcgcacttccgcgtgctcatgcactctcacgtttcccattcgtgcgccgcgacttggcctgtgtcgtgcccgaacacgttacttggagcgaactggcaatcaccgtgcgcgatgtcattggatcgttacttcgtgacgtgaaactatttgaccgctacgtcggtaagggtatcgaaccaggctttaaaagcctggctattggcttgattttgcaggatgacacgcgcactctgatcgaccgtgacgttgacgacatcatggcgaaggttgtcatggcgatccagcaacgacacgacgtgcggattcggtcttgatgtaataaaggggggacaccagcatggcattgacaaaagcagagatggtcgaacgtttattcgacgaagtaggcttgaataaacgcgaagcaaaagaatttgttgataccttcttcgacttgttacgcgatgcactggagcaaggacggcaaatcaagctttccggcttcggcaactttgaattgcgctgtaaaaatcaacggcctggccgcaatccaaaaaccggtgaagaaatcccaatttctgccagaacagtagtaactttccgatcgggtcagaagctgaaggagagggtggatgcctatgttggatccaggcagtaaccgagaactaccaacgattccagccaagcgttacttctccattggtgaagtcgctgatttgtgcgacgtcaaacaacatgtattgcgctactgggaaaccgagttccccagtctggaaccagccaaacgccgtggcaaccgccgttactaccagcgccacgatgtcttgttagtgcgtcaaattcgcagcctgttgtatgaacagggatacaccatcggtggtgcacgcttgcgcctggagggggagagcgcccgtaacgaattgaccctcagccatcagatcatcaagcaagtgcgcctggaactggaggaagtgttgcagttattgcggcgctgagtgcttcgaactgctcctcttatcaatctccccgcgtttctggaatgctacgtagatgctaggcagtattgaggtaataccgctatacggtataatcccgccctgccgcaatgtcggcgtactgttgaccggggtatagcgcagcctggtagcgcaccagtctgggggactggtggtcgtcggttcaaatccggctaccccgaccatattttctatatttaataccttccaagtgatggcttcgcagaaaaatgcgccatcaccttgtcgacagccaccgatcgcttaaaacctgtttgctgcctgccttgcggcatcgcctgcagagactcctcatcgtcgtcctggcgtggctagcagcgcttggctaatgttaaaatctgactgacttagccacagcagcttgggttcctccacatggaaaccaacctactggcactgccaatgcaatgctacggacttgcacatcaagcaagtatgacccacctcctatgacacacgtgcagccgtatcggatggagcgtgcgacatgcacggcagcatcttagccaagcgtgatcgacaagttcagtcaaaaaaagattccgcgattcctgctgtagaaaacgactgacgcgcctgcaactgctccacctcctgaaaatcacctattttccctgcaaggcgatcaatctcatgcggctggcgaaccgtgaactcgaaccccgccaaacatcacaaccacagcccccacaaactccacaaaacagccctgttgtgcattgtgcatccatgccccgctgccacccccgtttcgtaaacgtgatgatgcaaaccttgctgcacatatcgctgactgaccaccatgaagcgaaccatcttcccgacgatcacccgtcgtgcaatctactgcgtggcttttgcaaagcactgtgcttagagacaaacccaatagatgcagaccctcgttagatcactcctacagccaatcggacgatgtggacttgcccctcacctgatcggctacatacccaggaacatgggtcagtaccccaccctggcattggaacgtctgcaccaagccatccacaaccacatctgacagacacacaagccacaggagaatggacatcgcgccatgcccaccatttctgaaaacgcaacatcaaacctttgaattctgcaatacgcaggccattgttcctatcgaacccgaagcacgatacatgaccatggagaatattgctcaccgctactgcacctgcaaaacctgcatgacgcgttgatcgcgtaccaagtgtggacacgatgataagcgccggtatggccgactgacgcaggctcctgtgtggatcagcccggtacagttgtattgatacccccgacctcgcaaaatcctcccaccttgatactgatccttcattcctcttgctgtaatccgtctgctgaatgcccgggttcatctcaaccagcttgcctcgatgctgccgacacctcgccccagcccatgcctcttgtgataacagcgccaacccagaccttgggatgtgcttattcccattcaacatcgaagtaccccctaggaacgaccgtggctggccacctgaattgacccaccgcttaagcgcgagattgagattgaagtcgtccctacctcgtaacaccgccccgtgcgtgtgctgctgcatcagtaccaacatgatgcaggtgcgacgatgagcggtttaatcgcttactgccgtcaagggtttgagccggaattggcggctgaattgagggaccgcgccgtattactcggaatcgccggtgatatacacgcacagcgtaatcatggcttcgtacttttgcggtgcgatccccttcatgtcgatacactgctacagcaattgcactggcgccgcttgatcttcgcgcgacaaaccctgcgtttacatgccgaactgaaaacactcaactcacgagaccgcattgctcccatcctggcagcactccccaagacaccatgctttggtgatttgtggattgagtacccagactcagacatgggcaagccattagctggactagcgcgcagtttcggcaacgcattgcgtcccgtactgcgcagcgctggtcgactttccgcacagctccatccacagtggccgcgcctgcacgtctgcttcttgagtggtgaccacgtattgctaggcagcacacgttccgttgacagtgcgccgtggcaactcggtatcccgcgtttgaaactgttgccagaggctccctcacgctctgcacttaagttggaagaggcattgatcaccctgctcacttcgaacgagcgtgaagccaaattacgccctggcatgcgtgcgaccgacctaggcgcagcgcccggtggttggacttgggtattgattcgccagcatctgcgcgtgaccagcattgacaatgcggtattgcggccatcactgctcaatcatccattggtccaacacgtgcgggccgatggctttcgttggacaccaccacggccaatggattggatggtctgcgacatggttgaacagccgcgtcgggttgcagaacgtatggctgtctggctgcgtgaagggtggtgtcggcacatgatctttaatctcaagctaccgatgaaaaaacgttgggatgaaacccgattgtgtttggaacgcttcgaaacccaggcggtagtgccactgaccctacgcgccaagcagttgtatcatgaccgcgaagagatcaccgtttacgccagcaacaacgctcggtaagttccttcaatcacccattgatcacttcattcggcatcacgcgaccggcacattgcatggttttggaacatcctgtttttatgattgctgaatttaaataacaccgtatggacgctaaacagaccgagggtgtttaaagcacctttggtgaaaaatagtagcttttttaaacttaggatggtgttgccgtagtacgggttaacgttcagttcagcacgcgataaataggtgccgcagaaaaaatggctccgatctaagaataattaataccatccttgaatagataatttggtatatcaatggcgtggcggtataaattttttcggttaactgcgagtgagtttaaacgtttgtgacaatgtgttttttcaatgtcctatcgggacataaaaaagaacgctttttaaacgctccttcgatccgtgttatcgatgttcaaatattcatcatgcgcgactgctccgatatcgttttcccagtcacgcaatgatgctttcatctgtttccgcttattcttatcaaaatatggaattcccgatgatggccgatgaatccatcaatcaagatacaggcctgttttcttatatgcagcaatagcacgtcttggtgatctaagacgtcaatatcatcgccaaaggcaatcgttattggttgtgcatttcaaaagcaaagcagcactgcaacgcttgcacaagatttatctacacggagtggctcaatgtatctatgtgctgacacgcgacaacgcttggctgcccagtaacaagaaaacctttgacattcattcagcctgggaaggctggaaatttctcatccgggtgtttcgctttccacgccgtataagcggcagtgcctatccacgcctcgaaaggcttgggtattttcccgcgtccgctccaggtcgcaccggaatgtggtaaccaatacttgattggagcctcgcgcttggctttgcttggtgccttgcggggaggtgttacctccttgactagtgcggtgatttcagacttctgtttaacgttgaagtgtgtcccgaaggtgttaatcgcattgatgatgtccagaaatgcatcatgtgcctgtgtttggcgcaattgcgcttcctgttcttccagtttgtgtagctcttccgtcagtttaatcttggtttgagcaatcaaatccaaagaggagctggttgtatcgttcatagtttccggtgtggtgtcttaaagtaagccagagggaatgatcagttaaaccctaggtattttttcatcgtagataacagttgccgagtaggtcactatttattatctgccgatggatatcaatgcctacatggtactgaccaaaccctgattattggagtgattcatgaatactgagggaaacgatatttctattgtcttaaccgcaatcgcagccccctccaagccaaatgccaggatgcgaagtgtaatacagcttcactcctcggaatgaaacgttaggtatctgacatagataataatggttgtaactgtgtttcgagcagagagcggcgccattggccgagtgagtttggccatcggcgttgttcgatgagagcttctaaatgacgacgcgacgccaggatgccctcaggtaaacctagatcatagctacattcggcgacgattttctgtagttgcttgagcaacgctttgtctgcatcgctgggtgcagttgccaatggcgcttgcgcttcatcggcaacaggagtgtgtagcgcttccagtatttgagtggcgagcgggtcccaggatttattgaactttttaagctggtatcgcagctcggtcagattgggaggagggaaccttgccagaatgctggccagttcgttgttcagtatccagttgcgtggtttgtttctggtgcgtgctgatgtctcccgccagcgcaataggcgcagcaggcggtactgtgctggagcgtcaagaagttgcgctgaatgtattgccagatgcggccagcgttcgttctcattttgttcgatattgtcggtcaatcgtgtgcagtcctcttccaaccaagcactgcggctcatttctgctaaccgttctgtgagcgtgtcatgcaatgcaaataaatagcggacatcgttagccgcgtagtctagttgcgctggcgtgagtggtcggtgcatccagtctgagcgtgtttcgcctttttccaatgccacattggtaaccgtggccaccaacttctggtaacccatcccaccacccaagcccgtcaatgcagccccaatttgggtatcaaacagcggccgtggtagcacaccgcaggcatacttgaatgcaattaagtcctcactggcgctgtgcatgattttgatgacattcggagcggccaaccagagtcccagcgcgtcggtcatgccggggaccagtgggtccaccaataatatttcatcctcaattgcgatctgtaccagcgctaattctggccaaaaagtgcgttctcggatgaactcggtatccataccgattcgggttggttttcgatcccaccaggtagcgagagtgtcggggtgctggatccaatgcggcacgtgatttccgtgattgagctaggattgtttgagtcgagcagaatagcctaaggtttgccgtggtgctttcttgggaggaagcgtatttgcgcatcgctggtcagtggattgtaggattgtgcgtgatattgtcgccaggatgcgccccgacgtcccagccggttgcacccaaggtcgttgctgcaccgccagcaacacctcatgttgcgattgccaccaaaaaatccgcaccgacacgcgcgctttggcaatccccgccggttgtattaggtgatatgacttccgtgcaggtcaggcggcgtgctgcccaggcattggctgaagatcgactgtaccgcagccctgacgatgcgattccactgtatttggcattgcgtgcccgcagtgacggtcgtgaccgtgtggctgaagaagggctgcgccgtgccttgctgcgtttgctggttctggcggatggcttattgctgcaaccgcaggcacaggaagaggcattggaacaggcgggcgatgtcaccatggtggccttgtcgctggcaccgcaggatccgcgagtgcatcgtttgcaaagtcgcgttgagactgcacaacgtgtactggccttcaatcttgctggtgaggacgatttgcgtgctggaacgttaggcgagagtggtcgcagtgccttgaatcacttccgtgatgcattgggcttggatccggacaatgcgcgtgcccgtcaaggcttggcggcagtggagagcgcgatgatccgctacgcggaacaagcggctgagaccactcatttcgacagtgccacacactggcttgatattgcatccacggtgcgcgaacaagcacctacggtgatcgacgcgcgcaggcgcatcgctatcttgcgtatagaaaaaattgccgcattgcgggatgccgtattgcgtgcaatttctgacccaaagaaattaaagagcgcacatgccctctttactgagattgtccgtattgctgctcctggtgatgcggtgattagcgagttgcgggagcgcatcaatcgcgcaacccattatgggagcttccgccggggacaagtgtttaccgatgcgatgcaagacggtactcgaggtccccaaatgctggtggtgccccacggcagcttccagatgggcgcaaccgataccgaaataggtgcctcagcggcggaacgaccgcaacacgatgtccgttttgaacggggttttgcgatgtcgattactgaagtcaccgtcgctcagttccggcgctttgttgagcagacaggctaccgaccgcgagcaacccggcgggggcactcactggtgtatgacgaacgtagtgggaactttgtgcggcgcagcggcgtagattggcagtctggttacgatggccgcgtggctgctcccaacgatccagtgatgcatgtcagcgtgcgcgatgcagaggcgtatgcggcatggatgtcgcgtcaaactgcgcgttattaccgcctccccagtgaagccgagtttgagtacgccctgcgtgccggccgacaaggctactacccttggggcaacgccgccgtcccagtgaccggaaactatactggcggcaacgatgtctctccgagtggacggcgttgggccaatgcctttatcggttatggggatcgctattgggctgtggcgcccgtagcgagtttccgcgccaatgcctggggcctccatgacatgggcgggaatctgagtgaatgggtagccgattgctggcactccagttatcggcgtgccccagccgatggtgtcgcctggtacaacccaggctgccgccagcgtttggtacgtggcggcagctgggccaactcaccacagcagacccgtgcagcgtggcgtggatcacaggattcagagatgaccagcgccaggatcggttttcgtctggtccgtgccatatgatgtgcagctctttacgggtagaggatcgtcacggtaggtgcttgccatgacgtcttcatcatgcgttgggcgaggacggtatgaggcgtgctaatagcaacatcaaatcctgggtgacatgggcaatgctgctaggtggaagtgttgcagtctgttcccatgcatacggcgatgcttccgatgggcgtgatggatggggtgcaatggagaggctgcccagtgcatcgtctggtgttgcgatcactgatccggatgctggcgccgcgggtttgcctcctctgccggaaaaagtgcagtctcacagagcgaccccaatacagagcagtggcgtcagtgcgctgccgctcgtcgaataccatgcgcccggtagtgatcggctggcgattatgatctccggtgatggtggttggcgcacactggatcgtaatttatcgaaggaattacagcgccgtggtatttccgtcgtgggatggaatagcctgcgttacttctggaagctgcgtacccctgagcagctgggtgacgatcttagccgcgtcattgccgactatcagcggcgttggggtgcccaccaagtcatcctgatcggttattcatttggtgccgacgtcatgccatttgcctacgctcacttgatgccgacgcagcgcaacggcgttgattttatttctttgcttgctctaggtcgcaaggccgattttaaagcccggatttttggttggctgggatggggcgagcatggcacccgggatgttttgacggccttaggcgcgcttgatttgcaccgtgtgcaatgcatctatggacagaatgataaagatgccgtgtgtccagaattgcgtgaacggatattcgatgttgtgatgcgtcccggcggtcatcacttcgacggcgatactgtcaaacttgccgatgcgatcttacaagggtggcagcggcggattgagctgcgggaaccacgcaatgccgacagccctcgttgaggtcaccagctgctcgcagccgtgagtcaccaccgtacaccgtgattgattgcgatgtttttagttcatgtgctactgacttcgaccctgacgcggagctggccatgtgccagcttggtgtctagaacatcgccgacacagacctgagcactgtcgcgtaccaacgtgttgttatcggcgcgatgtaccagcgcatagccgcgcgccaccgtggccaaagggttgaccgcctccaaagcacgtaccagcccatgcagacgcagctgctcctgttgcagacgtcgctgtagcggttgctgtggatttaaatgctttaggtgctgttgcaatcccgcaatctgctgtcttgggttgagtgcatacagccgggtgtggtgattgcgtagttgcccttgagcgcggtcaagcacgtgatgcaggcattgctcaaggcggcgtccagcttcggcttggcgttgcgccaacagacgcaagtgcatctcaggattgcgtgcctgcaagcgcagccccagttggtcggcccgttggatggcttggtccagacggtgttgctgcaaatgcagcaagcgctgctgcaactggcctaagtgctggcgcagtgcgcgttggtcggggaccagcagttcagccgcaacagatggcgtgggtgctcggatatctgcggcaaaatccgcgagagtgaaatcagtttcatgaccaatcgccgagatcaccggcgtgtgtgcggcagcgatcgtacgtgccagctgctcgttattaaatgcccaaaggtcttcaagtgagccgccgccgcgtgcgatcaaaatggcgtcgtaacggccgctgctgtctgcgcagcgcagcaaatgggtgatttgtgccgccgctgtatcgccctgcaccaacgagggcagtaattcgatttcgaccagtggaaagcgccgcatcaacacgctgaaaatgtcacgtattacagcgccgctgggcgaggtaatcactgcgatgcggcggggatgcacaggcagaggctgtttgcgtgcaggatcgaataggccttcggcttcgagccggatacgtagttgttcaaaggcccgacgcagcgccccttcaccggcctcttcgagatggtcgaggacgatttggtaatcaccgcgcgcttcatacaacgtcagccgcccccgtgcgagcacccgcaaaccttcgcgcggctgaaacgtgagccactggctcttgggtttgaacatcgcacagcgtacctgcgcctgcgcgtccttcagcgtgacatacagatggcctgaagacgggcggctgacattgccgagttcgccctcaatccacaccagtggaaacgcgctttcaagcagatcgcgggcgagagtattgagttggctgggtgtcaggatctcgtcgcggtgctgcatctgtgcatgatgacttggtcaggcaggatgcagtgtacttctgcctccagagccgacgcacggtatatcgctcccctcggtgatgcaaatcacggaccaggcgatggatgcaacgatgtcctcaaggcgcttgcgtatcggtggcatggacgcgcacattctgttcttgagtgtccagcagctcgggtgtacatgtcttcacttctaagcatcctccaagtgcgcagcgcagtgttgcagtgatctgctccttgccgagtctctggtactgcgttgcttggtgtttcctagagcgttggctatcccggagcggcgtggtgtgacaacggactctgcggtatcacgctgctggaagctggccacaggcgcgtatccatctggaaaaacactggatatcgcatgcttgcgcgtcagtgtgacaaccatacccacagagataaaatttccacatgtctgctccttttgcgctctatgacactgccgccgccgctgcgcttgatgcacggctggccgcgcacttgggtgatgatggtgatctgttgatgcagcgcgctggccgtgctgcatgggatctgttgcgccagcgttggccagatgcccgtcaggtgctggtggcatgcggtactggcaacaatggcggcgacggctatgtactcgcctgcttggcgcaccgcgccggctggcaggtacaggtggtgcacttgcccgggcgtggtccggcgtcgttgctggcgcagcgtgcctatgatgcgtaccttgccgcgggtggtcaggtgatgctgttctcagggggactcgagacggcggatgtcttggtggatgccctgtttggcattggtttgaatcgacccttggacgtgccgacgcaaggtttaatcaatgcactgaatgcggctggtcggccggtgttggcgttagacgttcctagtggcgttgatgccgaacgtggcgctgtatttggtacgcccgtatacgcgcatgtcacgctgcaattcatagtgcctcatgtgggtttgtatacaggcccagcattggaggccgtgggtgagcgtgtactcgccgcgcttgatgtgccgccagcactacgggatgcgctggcaccttgtgctgagcgatgggggtcacagagactggcatcccgattccgtccgcggcggcgtaacagccacaaaggtgagtttgggcgtgtgctgtgtgtgggcggtaattgggggagcggtggagcaatcatgttgagtgccgaggccgcattgcgcagtggtgccggtgtggtacacgtggcgacgcgtgaagcacatgtggcccccttgctggcgcgttgtccggagacaatgccgcgcggtgttgccggaagtgccgagctgatgccgttgttggccgcagccgatgttgttgcgcttgggccagggttaggacaggacccgtggggccaagcgttattggcagccaccctcgacagtgggtgtgccctggtgattgatgccgatgccttgaatgtgttggctgcggcgccgcgtcccctgccgcctggtgcaatcttgacgccgcatccgggcgaggcgggccgtttgcttggctgcacgacggctcaggtgcaggcggatcgccgcgcagctgcgcaggcgttggcggcgcgttttgctgctgtggtggtgctgaagggggcgggcagtcttattgctgcgccgggttgcttaccgtgcgtcattgatgctggtaatcccggcatggcggttgctgggatgggcgacgtactcactggtgtcattgccgcgttgcgtgctcaaggcgatagcgtgttcgatgcggcattattcggcgcgttgttgcatgctgctgctggtgacttggtggcgcgtgatgggggggaacgtggtttgctgcctagcgatgtcctgccggtactacgtcgtttgattaacccggatcctgcgctgtgatcgaatttcaactcactgatgttgctgcgactgagcgtttgggtatggtgttagcccacagtcggccgctgccggccgtgttgtctctacaaggtgatattggggctggtaaatcgacgttggcacgcgcactgctgcgtgcgctgggtgtcactggggcgatccgaagtccgacctacacgctggttgagcggtatgtgttggccgatggcggtgaggcttggcacttggatctataccggattggcaatgcggctgaactggatttcctcggtttggatgaggacgaggttgtgctatggctggtggagtggcctgagcgtggcgcgggtgcgttgccgtcgtttgatctggaagtggctctggccattgagggtgccgggcgtcgtgtccgattacgtgcctgcagtacgcaaggtgaggtatggttggcggctgcggtgataaaaatgcaattgccggttgtttttccaggagtgccctaggaaatgacgccaggctatggattattaaagataaattgcttgcaattcatagggggcgatgcttgaatcattccccatgattccggtgagtcttcgattccgatacgttgccttgctgcttgtggctagtttggcggtgctggcgccgcggctgcatgcgggtgaggtcaatgcggtcgagttgaccagcagcgccaatgggacccgtgccgaaatccgtctttctggtcgtggtgctttcaagacaatttcgttgtctgcgccagagcgtttggtggttgatttccctgcttccagtgccattgaatccctgaagttgcctacagggcgcggtgtggtgcgtagtgtgcgcactggccagccggtgtctggaacgtttcgtgtggtctttgacttagcgaatcctgtcgctccgctcaaaccgcagatgcaagtgattggcaatgtctccacgttggtgattgagtggcccggcggtgtcagccacacatccactgcggcggctgtgccgtctgggagccgtctgggagcagagccggaccctgtgccggcgattgattcacgtgccgaggccgcgcgtgctacggcgatgttgacgggcaagggacaacatccctcggcgatgccggttgctcttggattgggcgagctgaccacgcatggggtgtcgcctgctgacattctcaacggagcatcggtagacgatgctcgatctaggccggcatctgctgctgtcgctgcgcctgcgtcgacgtttgcatcctctgctgcgaagggagctgttaacacgttgcctagcgggaccgtttcgccgcttgctgatgtggaaggtactccggcagaagacaccgcattagtgccgacggctcccgtagtgcctggcaatctgtcgcgtatgcagatggcatctggtatgcgctccttggtcgtggcgattgatcccggtcacggcggtcaagattctggtgcggttgggcctaccggtaaacttgagaaaaacgtgacgttggcgattgggcgtgagctggcgcgtcagatcaatgctactcccgggatgaaggcttacatgacgcgtgatagcgatgtgtttatcccgctgcccatgcgggcgcaaagagcacgtgcggccaaggctgatatttttatttcgatccatgccgatgcggctgataatcgtgctgccactggttcatcggtctatgtgctgtcgacgaggggggcttcctcacagcgtgcgcgttggttggcggataaggaaaatgctgccgatctggtcgggggggtacgtttgcaaaaggccgagccaacgttggctaacgtgttattggatttggcgcagagtggttatatgaaagcctctgaagatgctgccgatcatgtgctgggcagcttgaagcgggtcgccaataaccataagtcggaggtggaacacgcgaattttgcggtgctgcgtacctcagatatgccagcgatgcttgtcgagactgctttcatttccaatgcatatgaggaacggcgcttggttgatcccgccttccagcgccaattagctgctgcagtgttggagggcgtgatcacctttttcaccaatcagccgccgcccggtacgttgttcgccttgcgcgcacaagccgagccagccacgactggtggctcggtgaacaccagcacgcattaagttgcttgatggtgatttgtcgattcttagagtgaatgtccgggtgttgctgctgcgtgtttcctggatacctgggtgtttaatcgttttagatcggatggctgttgcctgtccgttatccctggagaagcgctgatgccaatccgtcagctacccgagattttgattaaccagattgccgccggggaggtggttcagcgtcccgcctcggtggtcaaagagttggttgagaatgcaattgatgctggtgcaacgcgtgtggacattgagttggaagcagcaggggggcgcttgatccgcatccgtgacaacggccacggtatggctgctcaggaattgccgctggcagtcttgcggcacgctaccagcaagattgcctcattggatgatttggaagcggtcgccacgctgggtttccgtggtgaggcactgccttcgattgtttcggtgagccggtttaccttgatgtcgcgtcgtgctatggatgaacacggcgcggtattgcagattgagggaggcacgctgggcgaggtgatcccccatgcgcatgcaccgggaaccaccgttgaggtgcgtgacttgttctataacgtgccggcgcggcgtaagttcctccgtgctgagcgcaccgagctgggtcatattgaggaatgggcacgttccctggcactggcgcatccagatttagaattgcgtctctcacataacggcaaactttcgcgtcgctataagccgggcgactggtattcagatgcgcgcttgatcgagattttaggagaagattttgcgcatcaggcattgcgtgtagatcacagtggtgcagggttacgtctgcatgggtgcattgtgcagccgcattactcgcgctcgaataccgatcagcaatatttgtacgtcaatggacgtgcagtccgtgatcgtagcgttgctcacgccgtcaaacaggcttacagcgatgtgctctatcaggggcgtcatccggcgtatgtgctgtttctggagttggacccggcacgtgtggacgtgaacgtacacccggccaaacaggaggtgcgtttccgcgatgcacggcttatccatgattttgtctaccgtactgttcagggcacgttggcacagacgcgtgcgggtacgccgccgctggcggtgggtgcgggtgatgtggggggggagggtgcaaggcctcctgtccgtcatgcggtgtcgttttcagggcggcgtggtggtgcctcgcatgtgctggggagctactctgccagcacggctcctctgatgcagagtgcgccaagcgtgtctgtcgctgacgcgcccgcagcgtatgcagccctgtatgctgcgccaccgacacaggtaatagatgcagtgccacagatgcagacggggctgccgctggctgctggggcgggcgacgtaccgccacttggctatgccatcgcacagctgcatggcatttatatcctggctgagtgtgccgatgggctgatcgtggtggatatgcatgcggctcacgagcgtattggttacgagcgcctgaagcgcgcccatgatggtattgggttacgtacccagccactgttggtgccgatgacgttgatggttgccgagcgtgaggctgatgttgctgagtgtgaagcggagacgttggccagtcttggctttgaagtgacccgcagtggtccgggttcgttacaggtgcgtagcatcccggcgttgcttgcccaagcggagccagaaatattactgcgcgatgtgctcagcgatctgagtgaacatggccacacccggcgtgtggccgaggcgcgtgatacgttgcttgcgacgatggcttgtcatggtgccgtgcgtgctcagcggcgcttgagcatttccgagatgaacgcgttgttgcgtgatatggaggctacggagcgctccggtcaatgtaatcacggacgtcctacctgggcgcgttttagtttggctgagatcgatcgttggtttcttagggggcggtgatgcggcgtgaataccaatacggggcagtattgatattgttggctgtggtcggagtgcttttcacgtttttcgcgtggtgtcagcgtgatcgtgatgttgtcggaacaccgtttgtgagcatacgtgggatattccaggccgatcatcgggcgtggtgtgagaatcggcggcgtgagctgactaagcctgatggatggatgagtctgattggtttgcattggttggggccgaaggcacattacatcgggagcagtcccgacaatggcattcgcctagcgatggggccgcctgacatggggatgattgagcgcgatggtgatgttgtttggttcactccacacgccggagtgccgctgactgttgatgggcagccattgcgtggtcgtgtccgtgtcttcagtgatgcggatctcacaccaaccacgattggttttgatgatggcaagggatggttgacgctgcttcggcgtggcgaccggtttgcattgagggtcaaacacgtgaatgcgccgtcacggttgcactttactgggttggagtattggccatctgatccagagtggcggatttcagcgcgctatctgcccaacaaggctggcgctacgttatccatttttaacattgttgggatgactgccaatgtgcctaatgcaggtgtgatcgcgttcgagcgcttgggccacacctatcgtctgcaggcgatacgtgcggctgggcaggcgctgtttgtgatgtttgctgaccgtaccagtggccacgggagctatcctgccgggcgcttcttggaggtggatgcgccggataaacaggggagtgtggtgctggatttcaatcgtgcttacaacccaccgtgtgcatttacgttgtttaccacgtgtctgctcccgccctctgagaaccgattgaatctggcggtgaccgccggtgagaaggcttaccatgtatcgacagtgttgccatgaatacatgggcgttgtatttgagtgtttcagaccgctatttgatcttggtcgatgctgtcccaggctgggtgaaggggcaaaccctcatctgccaccgcagcggcacacttgaatgagtgattggttgctgcgctgtcagtctttcgggggagtgatgtttcaatctgggcagagcgttgtaccggatgttctcctgttcctggtctctgtctgactgagcgcaacggtgtataccgctgttcggtgggatgcgttggatctgtccgttttaagtgcgtggcagcgtcacgcccgtctgtccttgatatttgccgttgcggtcgcggtaggatgtttggcacacgtcgtcgggatcggcttgcaggaacaacatctgcgctacaccctcgttcgcgtagatgcgtgcgggtaacggggtggtgttgctgaactcaagggtgacgtgtccttcccactccggctccagtggggtcacattgacgatgattccacaacgtgcgtaggtgctttttccaagacaaatcaccagtacattgcgtgggatgcggaaatactcaatggtgcgtgccaaggcgaagctgttcggtgggatgatgcagacgtctgattcgacatcaatgaagcttccattatcgaattgttttggatcgacaatggttgagttgatattggtgaatatcttgaattcacgggaacagcgcacgtcgtagccgtaactggatgtgccataactgacgatgcgttgtcctgtggcgttttgtttgatttgaccgggttcaaacggtgcaatcatgccgtgttgttgggccatatgccggatccagcggtcgcttttgatgctcatgtggagtccttggaaacagtgggcgtttagccgtgcattctaaccgtggtgagtgatgtacgtgtcggctatcggtttacttatccgccggtgatagtgtgttgctggcatattgaatctgcctatgcatattcttgaccgaagtgttagtacgctgatttgacgccgtgaacacgcctctttcaaggtattgccgatgttgttggtcaatgtgtaactcgtgaaagtgtggtttttgatattgctctggtggtgcagggtgacactgcaaacattgattatgggtactgatgttctggtgagaggggatgcgctgcttatctttcttaagggagtgagcttgagagcgcgcacaagtggtgtgagccatatgccggtagccgttctacagtaaacatcgggtggcagagcagtattgaaaatctagcactgggggatatgcactgtgagttgagtgcatggatcacgggttgtacgtgcttgatggtgctccctgggcatctctgacatgaatactcacgaaagaatccgaatgccattgtcctttctggtagcccaggggggatattgggtcaagctacgagagaagcccaacttcgccaaatgacatagatcgcgacagcaattacgatcaacccgaaaacccgattgagtaggtgtttgcttgctgaaaatcgggttgctaggagtgtgcctagtcctcctcctgtaataccgcctacgatgaattccatggcaatcgtccagtccaccaggtcgtggcgtgcatagttcaaggtagtgatgagcccaaaggtgccgaccgcgagcaacgaggagccaatggcgttgatagtgggcatcctagtcgcaaaaatgagggcgggtacgatcagaaaaccgccaccaatcccgaagaagcccgatgctgcacccgtgagtattgcgacggcgctggttttcatacacatccgaagtacagtttggtgctgctcggcatgaggagcagttgcacgcccacgcagcatcagcagacccaccatggccatcagcaaaccgaacagcaatagtaaacgctgtccatcaatcagcataccgatgcttgagccaaggaaggcgcccaacgtcccgaccagcgcaaaaatcacggcggatcgccaccatacatggcccttccacgcatgggcgattagattggcataagcgttggcggacaccgcgacagcgcttgttccgatggcgatatgggggttggtcacgcccacgacataaagcaggagcggtgtggcaaggatcgagccgccgcctccgagcagaccgagcgcgaagccgacgagacctcccgagccaatggtgacgatgagagattgaatcgtcatgagaggcacctcacgacgattcgatcatggatgatcatgcctgctgccatcgctgctacaaagagcagaactggcccaagtcctgtagacagactggcgattgcggggcctgggcaaagacctgttaatccccagccggttccgaaaattgccgagccgaacacaatacgtcgatcgatcactttcttcgaaggtaggtggaagcactcgtcgagcaaaggccgtttcagacggcgttgcaacgccattcctgggaaagccacagccaacgcactgccgagcacgaaaaggagactcggattccaatgaccgctggcgacattgagaaagctcagcactcgaatcgggttgatcatctccgacaatgccaacccaaaaccgaagaggaggcccgctgccagagctacagtgaaacggagggtaacgtgtaggctcattgatagactcccatgaacgtggcggtggccatacccgagatgaggaaaatggctgtagcaacgatggaacggggcgaatgccgggcgatgccggcgataccatgcccagacgtgcaacctgcgctcatgcgagtgcccaaaccgaccaaaagcccagcgacgatgatcgtcggccacgtcgcggccaccgtcacagacggaaagcggtcaaagatcactgagaacaccaatggtccaagaacaagccctaccacgaaagggatgtcctgggcaggattgccgccctggagcaagcgaccgacaatgccgctgataccagcgatgcgtccgttgagaagaagtaacatgaccgtcgagagaccgagcagtatgccgccgagaatggggtaccaatattcgctcacgcctgtttctcctgtgcgcagaagatcgtatagagtgcgtttacaagctgggcggccttcgcttctgtcagacggtagaaaatctgcttaatattgcgtcgcgtctcgacgatgccagactcgcgcaacactccgagctgttgggaaagcgtcggctgcccaatgccgatctgctgttcaagttcaccgacggagaattcgccctcgaccagtgtgcagaccaacatcaaccgtaccgggtgcgacagtgtcttgagcagattcgccacttcgttggctcgcttctccatgtcctcacgcgtcatatggggacgcgtgtcatctcgcatttcgttcaccatgcggcaccttccagggcattaagcgggaacttgaggtagcgccgaccgtttgtttccggctccggtagccgcccgccgagcacattgacctggagtgcatgcaggatcagttttggcatcggtagtgtcttgtcacgtgcttcgcgcagtgccacaaacgttgtctcgtccacacctgccagatgtgggttggcctttttctgttctccgacggtgctttcccagcgtgggtggcgtcctgatggctgatagtcatggccggtgaagagacgtgtttcgtcgggaagcgagagaatcgtttggatggaactccagagtgctcgtgcgcttccgccgggaaaatcggcgcgcgcggttcccgcgtcgggcatgaagatcgtgtcgtgcacgaaggcggtatcaccgatgacataggtcacagaagccagcgtgtggcccggtgaaaacatcacccgtcctttgatggagcccacattgaagacgtcgccgtcggcgaacaggtgatcccattgtgatccattcgcgctcagggtcggccaattgtatatctctctccacagtcgctgcacttccgttacatgagtgccgattgcggtcggtgcaccggtcctttgcttcagatactgagcggcggagaaatggtcagcatgcgggtgggtgtcgaggatccattctactgtcaatccctgctgctcgacatgagctaaaatggcgtcagcgtttgtcgttgcggtagcgccggatttctcgtcgaaatctaacaccggatcaatgatggcgcatcgcttcgtagtctggtcggtgaccacatactggatgctgctggttcgcggatcgaagaagcctgaaacgcgcggagtctggatggcttgacgttctaaccaggtcactgcgcgcccaagatcgaaaccgtgggcgtggccgagtgcctccacttcatcgcgtttcatgcgtccgtcgatcacctcactcagcgcgtaaagcatcaaggcgcgtgtcccgcttttgcaatggaccagaaccgatccctccgtcgttgctatcgctcgctggaacgcctggatatcggcctcagtgatggacgttccgatcaccggcacgaaattgtaggcaagtccagcgcgacgtgccgccgcttgctcggcatcgttgccgggctggtttggttcttctccgtctggccggaggttaatgatgctgcgataacctctacgggcgaagttgatgaattcgtcagtattcggctgtcctgagatggccagtcgttcgttgatgtctactattctcatgggattccttcataaattacaatatataataatatatattgaatgggtggaagtagtcaaaggtgtcgcagacatccttgcagcaaaaatcacacgccgtgctgcttccttgggcccatgtctcattcctttgcgactatctctggaacgcatttgatgatcccatcgaacgtttcagattaatccgtgcttactgtttcaatccaagcaacttcaagttcccgtagtgagtattcatgtagagatgcccacggaaccccacagagaaggtttttaccaagtccaggcgttccagtgtatgacgtggcgcagcggcacagagtgctatgcagtgtctggtgactcatccacttggatgttgttgccattcatttccgacgattcccaacacatgttcgtattgggtatggctgctccagcgagtctcaaccggtgtatccatcgatctccacgagaagatcattgcggcatatggtgccgtgcaacagcaggtgcggaatggcgcccaggcgctcctgcagtgcggtggcaatgtgtggcaaatccatctgttcgcgcacgtagacttttaatcgtgtttttaggtcgaagtgtgttggtatttttgggtgctgtgcgtgcgcttgacggaggagcacattgaagtttgcgaagatttcttctagttgtgccaatgggtcacccgggtgcattgattgatggccaacgatggccgccgtgccagataacaacagtggcattgcgctgttgcggggtgggagcattgctcgtgcgaagcttggaggttgtggcccgtaagtctttgggtagcagtaggcgctaatttgacgggggttttccagtggtgtgccagggtgcgccgaggccaaccaatacacttgaaggatgcggtgtccgttggagtaaccgatcgctgttgcagcaggcagctgcgcggtctttaagccgctgatgccacgtgcgcggccaatgttgaatttgcggtagcgttcgttatcgccagtaccgatggtgattccatccacatagttccagatccgtaataaatggggagtgctgctgccagcaacgaaatgtgtgaggcgtgtgtagagttgttcactacagatatcaatgggctgtgtgttctcttccaatgcaatcgtgccgaattgcagttgtccgttactggcccaggcaatcccatctttgcgcccgacgtgtgtcggtgtgttgctgcgccatacttccaatgaggtgttgccgtatggttccaaagggacgcgcacgtagcgcgggtcagcggcgtgtggcgcatcggcaccaaaaccaaacaccgctagtacgcaatgatcagccagcaacatgggtagggttgctctgggtacgtagtcgatgtgtaacgtggtagtcaacgttgcattcattaaattgtgtgatggtggcgtcttgccgctgctgaatagtgccagtagctatgttgttgggttgcttcacacttttaatgtgagcgttacgtctattcccaggaaggagaagcaggacggttgcggggcagcgtgtaggagccgcgccgatcagcaacacatccgaagttccgaccttggccattgttgaccgtggaacagcgtacatacaaggtgtggtggtgtgcgtcatcttagagatgacatttgaacagtatgtaaaagtggctgaatgctcgctttgggaaagcggtcgggggagttgcgcgtgacgtgctgatgcctgatctttgtgcaccgtttattgtttggggcctcttccagatgtctgtgcaaactcccgctgagcgcgaactggctgagttaattgtggaaagtctcaatcttgaggatgtccagtctggggagattgatccggaagcgccgttgtttaacacggggctgggcctggattcgattgacgcgctggaattagcgctggtgattaccaagcgttatggtttccagatgcgttcggacaatgatgacaaccaacgtatctttgcttcgctgcgtgcgctttcagatcatgttcaagcgcacagaagaacctgagtcagtttcagagacagctgtcccgaggtgggtgctcggtgtgagcgttctgttggcgttggcttatgtggtgttggatcactgggccaatacgacgcatcggtcgtggctggcggtcctggcggttgctgctttggtgctgatggggttggtcgagccaatcgcacgtggccgcctctgggcgtgtggtgtcgcgttgctgctgttggtggccatcgtactgctatgggagtcgcgtcatgcgttgctgctgttggcgttgccgccgctggtatccatgggaggggttgcttggttcttcgggggtagtttgcgtcgtggtcatattccgctgattacccgtatcgttgaaggattgcatcgccaagctggccagagtatcggcccgctccagtatcgttacggccgccgtttgacgctgctatggacggtgttgctgacggggctgacggtggtgaatggtgtgcttgagttgtgtgcagtacccagtggggtgctcgctcagcttggtcagcaaccgtggctggtgattcctgacggaagtgtttcggtctatgtgaatcttttgggttacgcgttgattggtattttcttcattggggaatatgtattgcgtggatactggtttccacagcgtccatatcggaattttgtggattttttgcgccaaatggtgcgtttagggcctgagttctggcgtcattttttgcgctgagtgcggcgctgctttggggtaatccctgtgcatgatgcgttgttaggtcgtgtgcgcggtgttgtggtcgtgatcctgctgtctcgcgtgtggggacgcggcattgtgttgccaacggcgctttatcttgagtttgggatcgtggcggtattgtggtcgtctacatcttggatgtgtggggggatggtgtgagtgtggtgcgcaatcagggtctcaagcatgttcatgagagatgcgattgatggaattttccattcctaagacgcacccctgttttcctggtcactttcctggctttgcagtggtgcctggggtgttggtgttggcgcaggtgttacatgccttgcagggacgcgaaggcaggttgaccgggatctgtctgccacaggtcaaattcttgcggtcgctgctgccggagcagcaagcgcggatcgagctggagggagccatgccgcgctggcgtttccgggtttgctgtgcggacactcttttggtcagcggcgagattgttgctgggtcgggggcatgagtacattttggaaaaatcgtccagagggtgggtggcgtttcgcgctgtggctgattcgcggtattgctcggtatggcggtcggctgatcggtcgcgcactgttgtatccgatcacggtgtactttcttgtggtgcgtggcgcggaacgtcgcgcttctctgtgttatctgagccgtgtgttaggtcggccagcgtgttggttggatgttgctagacacttccatatgtttgcttccacgattctcgaccgtgtctatctgttgtgtgggcagatggagcgttttcggattgacttgcgtggtgtggagcagttgtctgtttatctggaccgtggctgtggtctgctgatcttcggttcgcacttgggcagttttgaagcgttgcgtgcgctggcgacgacgcatccgcatgcgaaactacggatcgtgctcgacaaggcacacaatcgtgtcacgagtgagctgctggatgcactcaatccggagcttgctgagggcatcattgatgctggtatggacagtactgcaattgtcatcgcgattaagacggcagttgaggagggagcaatggttgcgttgcttgtggaccgtgcctctcagcgggataccttactgccgatgatgttcctggggtgcaccgcagggtttcccacgtcgccgtggttgattgctgcggctttgaaggtaccggtagtgctggcattcggtttgtaccacggtagtaaccattatgagttgatattcgaggcgttcagcgaaggcctggatgtgccgcgtcgtcagcgtgcgccggtattgggggcgctcattggcgattacacggccaggttggagcgttacacacgttacgcgccatacaactggttcaacttctacgatttctggaatatctctgaggctgatgatgcgtcgtatcttggtgtggatgttgatactgctgtgcagcgtcgtaccgtcgctggttaccgcagcaaatgagccggacgatgtcactcggatactcaaggtgctggcgcactcagagtcggtgagcatcccgtttttggagttgcgcagctcggcattattgaagactcagttacgggtgcgtggctattaccgttggctgaatgtccagacgctggtgcgtgaggtgactgtgccgtatcacgaggtgacgacgttgcgtgatggcaaggtgttccttgagcgcgatggccagaaacgacgtgattttgatctgtcacatgtccctgagttggctggtttatacacggggtttagtgcgttgctgtcaggcaaccgcgcgctgctggagcggaattttcgtgttcgtgccgagggtacacaggatggttggcagctgcatttggcacctgtggatgcaacattggcgcaacaggtccatgaggtgcgtttgtatggacgcggtgccgatctgatctgtatggagagtgtgccggccaggggggatgtgcagcgtacgttgttggccggtgcggcgcaggctgcgacggaggcgggcaatgctgcaacgctggccgcgctatgtcacggccgttccacgtgagtgttggtcgtggtatgggcgaggcgctgaggtggggtgcctgcggtattggtacacgttgggggggcgtttctgtcagttctggcatgtttgatgatggcttcggggttgatggtttgatgttgtggcagtggtattccgttgttgttgttgttgttgttgttgttgttgtctgctgcactgtggaggccgatcgtgggtgattggatctctcggtgtcgtatcggtattgctgtgttgtggttgttgttgttagtcggtgtgggctggtggcttgcggatcggctgcaactcaccggtgatctgcgtcagttcatgcctgaggcacagactcccgcgcaaaagttgttacttgaggagctgggtgaggggccgggttcacggttgttgttgatgtcgttacgtgggagtgatccagccattttggcgcggcaatcgcaggcattacgcgagatattggcagggcagcctcaggtgtttgagttggttgctaatggtgcgcatgttgggctggaggcaattccggcccgattattgccataccgctatctgtttagtgacagttttgatgctgcgccgctggatgttgggtatctcaagcaggcgttgcagatgcgggtacaggatctggggtctccagccgcgcgtgtggttgagccgctgttacctcgggatccaacgttggaagtgctgcatgtggctgagcgtttgcagccgttagcggcacctgcaatgcgtgatggggtttggtttgatcgtgctggacagcgtgcgttattgctggcgcagacgcacgctgctggttttgatcccacgggccagcagcgcgcttacgatgcggtgcagttggcgtttactcgggtggcggtgaatacggcaacgcagttggaactcacgggacctggggcgtttgcggtggagattgctgcaaagactcaaggggaggcgcagtggatcgggatgttggatacggtaggactgattgtgctgttgctgttggcgtatcgcagttggaaggtgcctttgttgggggtgttacctcttgccagtgcgggtctggctggtttggttgcggtggcattgctgtttgaccgtgtgcatggcatcacggtggcgttcggttttaccttgattggtgtggcgcaggattatccgattcacttatttagccatcaacggccggggctggatccgcgggaaaatgcgcgccatttgtggccgacgttggcgacgggtgttgtttctacttgtcttgcttacgttacgtttctattttccggggtggatgggctgcgtcagcttgcaactttcacgattgcagggttgttggtcgcggcagtgaccgcgcgttggttgttgccggggttgattgatcctgcgccgcgtgatcctgccgattcggtcgtgctcgcgcggttatggcagtggaccgtgggggtgcggtgtccgcattggtcgctcgcattattgagtgtggccgcagttgttgcggtgctgctggtgcctggtccgttctgggagaatgatctgtccaagttgactccggtaccggttgctgcgttgttgcgtgatatgcgcttgcgtcaggagttgggggcgccggatgtgcgctatgtgctggcactgcctgcggtttcggccgagcaggcgttgcaagctggtgaggcgttgcgcccacgtctggagggtgcggttgcccagggtattgttgctggttacgacatggcggcgcgttatttgcctagcatccagactcagcgtcggcgtcaacaggcgttacccacgccggagcaagtgcggcgtttgatcgcagaggtggtgatcgcttcggggtttcgtgctgatgtatttgagccatttcaggcggatgtggagatggcacggcaggcaccgccaatgacgatgcagatgttgggagggactgcgttggcgatgccggtcagtggtttgttgttggtgggtactgacggtgtcaccgcgctggtgtcactgattggtttgcatgatccgcaggcgctcgctgccgtggtacgcggtagtggtgcacagttgatggatttgaaggaggcgtctgagtcactggttgtggcttaccgtggtcgtgtgttggcggcgttgggtgtcgctgcgttcctgttggttggcacagtggctttggcattgcgtcagtggcgacggatggtgcgtgtgcttttgcctatggcgatgacaacgttatggattgtggcattgcaacgcatctgtggggtggagctgaatttgtttcacctgattgcgctgattctcgcggctgggttgggcctggactatgcgttgttctttgaatacgccggtgatcatcgcgccgagcaattgcgcacgttgcatgcgttgttggtgtgcagtgtgatgacgttggtggtgttcgctttgttggctgtctcaagtattccggtgctgagtgcgattgggagtacggtggctctgggggtgctgcttaactttgttcttgcgttgttgatctcgcgtgttccggtgttggaggggattgctaggagtgatgctcatgtcgcagggggttgaagagattgctcaactggtgcctcaccaaggcaggatgtgtttttgggagcaggttgtggagtgggatacgacgcgcattgtgctgtgcagtgagatgcaccgcgatgtggtccatccactcctttgtgatggagggttgcacgcggtgcatttgtgtgagtacggggcgcaggcgatggcggtacatgggggtttgctcggacgccagatgggtcgcccagtgcggcagggggtgttggtggcattgcgcggggtgatgctgcacgtggataggttcgacgatttgccccaggcgctgcatggagaggcggaagtattgatgcagggtgaggatagccaacagtacagattccgtatcttccatgtggatcagttgctcgccgaagggcgtgcggtggtgatgttgggctgaatgcctttcaaggttggtactgacaaggagatttgggcaggtgatatccgtcaagcccaggtacaacggggggattcttcggtgaccagggcagggcctgtggtgcgccaggggacacaggtaacgccaacgcggtgagttgcggagcctcgttactagtgaggagcggacctggtgtgacagtgtattgcttctattggagcgggcgatgggaatcgaacccacgtcggtagcttaggaagcaacctcctgatgtcggacgatgctccaagcagttaccgttaagggaccgttctcaatggtccctgacatcttccgagacgttgaggaccatgtcctgccggattgtccttcatggttctagtggagcaatttaaccagttcgcttgccatcaacctagaaccgtctaaggacaggtggtcatcgtctctgtatagcatctttccgtctttgattgcccagcaccactgggaatcacaaagttgtgctgctgcatcaaatactttgaccgatgggtaatcctttagaactttcaaaaccaattcacgatactctttatttcgctcatcaaaatcatgcttaggtatggcgcaaggtgtttttattttatttgtgatgcgtaccggtctagaatcaacacaagattttggatcgaaacccaactcaggattatccaaaacaaaaacaactttcttcgttgggattaattcgttgagcgtatcacgcatcgcgtcctcccagatggcgtaattatcttccaggttaggatgttttttcgaaattaaaacgcgattatgatttttttcatctgcaaaatcattgtaatagaaacccttggaggaaagataaatcggaccacgggaccagagaataactgtatgaatacttttattctgtatcgcaatatcaattgctttgtcagtcatcaccaaacaactaatttttcctgcatcgtcagttttctgatcaaaactggagactcccctaaatggagagcacccacccgttcctaattgcatgacattctccgtacttccggagaggaaattacgcatgcctgggaagagtgcattggcatgagagtccccaataatctgtatggttggatccgcattattcgcaatgcgacagtaagagaaatttacttcaccaccaaatttttgcttgcagtaattttcttgattttcaggcaaccatggtgtgttctcattggagaacattgagttccttgaaaccagctctttgactctgaatgcaagtccatcacgggtgtaggcgttgtaaccaacataaccaaccactacccctagtgcgcttaggaatgcaactttcaaccaagttgaacgaccataacgaactcgcttctcgatgaggtagtaggtaagtgctgccagtacaaaactgattactatcgctgctatgcgaatgttgcgagaaggcgtctctgactcaacgatgcgagcgaaagacaacaacggccaatgccacaggtagagtggataactgatcagaccaacccaaacaacaaccttacgcgataggatttgtcgatttacccaagcgtgaggaccagcgaggattagcagtaccgcccccaatacaggggcaacagtacgaacacccggatagggcattgtgtggttgtatttcgctattgaataaacaatcagcgccaacccgatgaaagagagaatgctggacagcaatacactgcggtctttttcttccggcacttctcggaaaaacagtcgattgaatatccctgcatgtatccagcgggtaaaagacggtcgccatgctctgaaaccataaacgtacgcaagtaccgaacctgccatcaactcccaaaaccgagtttgaggtgcaaagaaggttttgatcgcgtcttttccaattcctttttggttcaaaacgaaagaaatgacgccaagcacaattacaccagtcaagacattcagtcttgctttccacgctgcccagactataagcgggaagattaggtagaactgctcctcaactgcgagcgaccacaggtgcatgagaggtttcagttccgaagcaacgtcgaaataccccgcttctttccagagaacgaagttctgtacgaatcccatcccagcagcaatgtgcttaccaagttgcttgaactcgtcgggtaatagagcaaaccaaccgaccgcatagcaagttgcggtgaccagtatcagtgcaggaaaaattcgcttgatccgatgagcgtaaaactcggcaaaggagaagtcattgtttaatagacttctgaagatgatcagcgagatgagatatccagagataacaaagaagatatcgaccccgataaaaccacccggggcataacgagggaaagcgtggtacgcaacgacaggaagaatcgctagtgcccgaagtccatcaatatccgttctatatttcggatgaaagttgtgtgctgtcattagtttttgactatcccttggtcgcacgagcacttcaccagtagtggaggtgcagacagacaatatgtcgtttgtaaaaatcataacggtacaattgtcgggatatacggagatagcgacgactgcagttgtgatttcttcaacttccaaatcacattgaaggactggattgtaacaacaacgttactggatgaaacgactggatatgatgaatcaattaacgaaaccatcctttcccttaattgcgagtacaagagttctcgtgacatcgacatcaggacggactttccaatctttgatttcattcgatataaaatcgaagaactcggaatggaggaaattcccaattcgggaaatgacatctcattggggttgaacaatacgaatactgagataaatgagaatgcattgtccattgaggggtatgtattcttggacaccgagtatcaatcaattttcgaagatctcttgggtgtcaccacatccgatttttcaggtaaaaaatcgaaaaagaaaaaatcaaagaagattaaggaagttgatcacccaaagggggttatcgaatcaattgagcacactgaaaaaacagtcgatcaaatgcttaaagaaattaggaagagaagaattcaaactaaccaccaaattgaactatcccccctgtaatcttcggacatccccttgagaaccccggacttcggggggggggccttttttgggtcttgaagtggtagagatttaggacggttcgggtgtcagattgtcgtggagtccttggaataaatatccaggaacaactacgaaggggactccgacatgaacaactggaacatcgccatccttgatgacctgttcggtcatggcgacaagcaacgatcaaggatcagtcagaaggtgcaaggattcgacaatgagactggtgagcatgtggtccgtatcgagtaccgggtcaaactggcgaatgagggtcagggcgggttgatccggtctgccaatgacaggttaatacggtcaaaccctgaccctcgagcgacccccagtaggagtcggcggggataactgtcatttcttttgcttatataaacaataaacagctatccccaggaaacccactatttacgggggttcccacggatatgctgtttctatatttttggggttcggttcagacccgagatatggggttcaggtcatcccctgggaccccaaggggtatcagcgggtagatggaccctcacttgaggagcggacctggtgtgacagtgtattgcttctattggagcgggcgatgggaatcgaacccacgtcggtagcttgggaagctacagctctaccattgagctacgcccgctgcggtacgcccggcagtctatgcttccttgactatggaggcaacgacgggagttcggtcgttacctcgaaggtgtgtttttgcatagactggcggtattttaaaagctgccgttgacgaataacgtgacatcgcgtgcgttcttctctgtactggtggtgaggccaacgttgctctgtagatgtccaattttggtgcgtgcaccgagtacgatgctggcgtagttgcgattgaatgtcagtcccggcacggaatagatacccgcttctggcatggtttgcagccatgcgttggcttggttttgttgtttcttgaattcgtgatcgtaggtcacctgtaagtacggggtgacgacgtttccttccagtcgcatctgcaagccgacgcgcccaagcagtgagttgagttgctgatcgggataacccagtgcggtgctgctggcgttttgttcggtgtagctttccaattttgttttttgccaggtcagtccagccactgagccatagcgcagccgaccttcgcccatctcgtaactggcgttcagtgcaacggtcaggttgctgccattgggggagccgcggtgtacccgtgtggctggaccgagttgcacttcgcgtttgatgtcgtagttcagcaaggtgtaactgatttgggcattgacccagacgggaccggtataccagcctgaaaagccgcccaaggtggtgtctttttgcttgaaggtgccgtttccattgctgaagtcggcatgcatacgtccgtagccgataaagctgccggacacaatttggccgctgttccagtcaaatccgaagaggccggctggtgcaacgcttttgtacaggtcgttactgtcattgcgttgtgagtcgctgcgcatgctgccccaccagtgcaggccatcctgctgcggtgtgccgtccagatgccaggcaacttggtaggcgcgggcgcgggcgatcccttgagccgagcgtgtcagcacttgctggagccgtggggcttccaagattgagatcgcgtactggcccaacatgtggtgtgctgcggtggttggatggatgtcatcggcgaatgcataggtgttgggtgcattcgtgtcgaccagggtcgtggggttgcacagtggcagtgtcagggtgcaggccgtgttggtggtgtcgctgaagccgtaggttgccggtgaggtgattaattcctctaataaatggaaggtgtcgatcgggatgacctgcaaccctgccgatttcaggccagtgaatagtgttgtgttataggcgttggccgcagcagtgctttgcgcggaggtccctgtgcttcgggcgcgaggtgccaaaccaagatcagggattgtcgcgactacgatgtaacgtgcgccagcatttttcaatgtgctcaccaggcttatttctgcggtggttgcattgccgatgatggtgtgtatttgttctggcgttgttaacgtgtcgagcaggtcgttaccgccaccccagagggtgtatagcgcgcttggatcagccttgcccccatgagcactgagataggtgttcgtttgagatgttagtgatggtgcttcgcccaatatgctgattgagggttcattgatgtgtgcgccaccagcggcgtaattgttgccggtttggccgttgccattgggggaggcattgcttccataatagctggcaacgtattcagaccagacccagccggggttggtggtgaatttgccggtgatggcttgtatctcgttcggtaggagggggcggtagtagccgctgtcactcaggctgtcgccgaaaaagatggtttgttgaaaggctgggttagcaatggccggtgtggtggctagagtgatggtgatggctaggagggagcgtgtgaaattggaggtcatgatgagggtgttttattcaaaaattgacggtgggtgctgcaaccaatgggtatgttgagtagtgtatgtggttatcgttcataattgtatttgatggaaaaatctgaatcagtaatgaaattaatgtcacattttttacctatgaatatccagcttaatggtcaatgtcgccgcatccccgagacaagttcaattgcgggtctgcttgctgaggagggattcagtgagcgtcgtgttgcggtggaggttaacggtgagattgtgccacgcactctgcatctgaattacgtgctgcgcgagggtgaccgggtggagattgttcatgcgcttggtggaggctgaagtgcgtgagtcgcgatgcgtagtgaggtaatgggccataatctctggatgaataatttcgcttccaatgatccgcttgttattgctggtattgtttactcatcgcggttgctcacgggcactggcaagttcaaagaccttgatgagacgcgcttagccactgaggcggcggggtctcaaattgttactgtggcgattcgtcgagtgaatatcggtcaggatccgcatcagcccaatttactgaacgttctctctccggatcgctacacgatcctacccaatacggcgggttgttacacagctgaggatgcggtgcggacttgccggttagcgcgggaattgttggatggacaccggctcactaagctggaagtgcttggcgataagaagacgttgtatccggacgtggtgcaaacgttgaaagccgccgaacagttggttgccgaggactttcaggtcatggtctataccagtgacgatccgatcttggcgaagcgtctggaggagatcggttgtgtggcggtgatgccgttagctgcacccatcggttcggggttgggagttcagaatcgctacaatttgctggagattattgagaatgctcaggtccctatcatcgtggatgctggagtagggacggcatctgatgcggcgattgcgatggagcttggctgtgatgctgtattaatgaatactgcgattgctggtgcgcgtgatccggtgttgatggcgagtgcgatgcgtaaggctgtggaggctggacgtgaagcgttcctggcgggacgtatcccacggaagcgttacgctgcggcatccagtccagtggagggattggttggatgatgaatctgctcagcaacgatggtgtccaagtgttgcctagacccttcactctcaatgaaagacgccgtgaagtgcgtagttttgtattgcgtcaggggcattttacgcctgctcagaagcgcgcttttgatcattattggccgcgctttggtgtggattttatcggtcagttgcgtgatctggatgttttgttcggacgcagtgctccgaaggtgctggaggttggtttcggtaatggtgctgcactgcgttttgctgcacagcatgagcctagatatgactatatcggtattgaagtgtatgcgccgggtgtaggacgtttgctcaacggattggctgaggatgggagtcgtcatgtgcgtctgtatcactacgatgcagtcgaagtgctgaataaggaaatcgtcgatggagcgcttgatgagattcgcatctattttcccgatccatggcacaagaagcgccatcataagcgtcgtttgattcagccgttattcgctacgctactcgtacgtaagttgcgtgttggcggatgtttgcacatggcgacggattgggctgattatgctgagcagatgtgggatgtgcttgatgccacgccaggattggtcaatcgcgctggcctgcgtggccaagtgccttgccccgattggcgagttcagacgcgctttgagaggcgtggccaaaatctgggtcacagagtctgggatctgctctacgatcgggtctgaattctcccactgggatcactacatcactccatggatactgctttgacgttgaccaatgacatgaagctggtgctcggtttggtcggttttacgatggcaatgtttgtttgggagcggatacgcgctgatgtcgtggcgttgatcgtgttagtggtgcttgggacaacggggttgatccctccagaagagcttttcggcggtttctccggtaatgccgtgatgagcatcatcgctacggcgattttgggtgcggggctggaacgtaccggcgcgttgaatcgcttagcggcttggctgttgcgtcgctcgcatggcagtgaacggcggttgttgttgattacgttgggggttgccggactcaactccccatttatgcaaaatacgtcggtgatggcgttatatatgccggttgctgcgcgtttagcggcacgtactgggctgacgctacagcgattattgctaccgattgctgcgatgatcgtcatgggtggtgcgttgaccatggtcggtaattcgccgttgattttgctgaatgatttgttgcaatcggcgaataacaatttgccttcgggaatcgccaccattgagccgttgcggatgtttgccccgctgccgatcggcgtggcattactgattgcggcgttgttttacttctttttttacggtgaccgcaagctgattcaagaggagcaattggctaacgaggaggtggctgcggcgcgccacgagagttattttgcgcgcacttacggcattgatgccgatgtctttgagttggtggtcaatgtggggagtccactggtcggtatgactgtaggtgaggctgaaactattcagggtgcgccgttgttattggcattgaaaacgggtaacgacacgcgcttgagtccgccagtggacatgcgtatctgggtggggagtgtgtttggtgcaatgggtccacgtcagcaggtggctgattttgcaaagaatcaattgttgaatgtgtcctcgcgattgcgtcaccttggtgacttgttcaacccggcatgtgctgggatttgcgaggtgctgatcccgcccaattcgcgttttattgataagacatcgactgagttgcgtttgcgcaagcaaatggggattagtttgctggcgatcaatcgtgataagcatgtgattcgggaagacgtgcgtaatgtgccgctgcgtgccggggacatgctggtattgcacagtctctggcaggatttagcgcaggcggcagaaagccgggattttgtcccagtcactgattaccctaagggtgagcagcgcccgcataagttcaagattgcgatggcaatctttgcattcactatcttgattgcactgactgccaagttgccggtggcgttgactttgctgactggtgtggcttgtatgctggttactggggtgatccgcatggatgaggcctatactgcaatcagttggaaaacgattttcatgatggccggattgatcccgctgggttgggcgatggatagcagcggcactgcggcttgggtggctgggcacacgattgaccggctgccgcatggaatgccgatatgggcgatcgagttggctttggcactgttgacgacggcgttttcgctggtgatcagtcacgttggtgcaacgattgtgatggtcccgattgcggttaacgtcgcgttggcagcaaatggcaatcctacggcatttggtctgattgtggcgctagcagcgtcaaacaatctgatgacggtgtctaacccagtgatttcaatggtgactggccctgccaactatcagccacgcgaattatggaaggtgggcgggccattgtctctgatttatattgtggtgatggtggtgatgattaatttaatgtctcaatggggtgtgctttgaatgtgtcacctgcatcgctgagtcatgatggtgcgattatctttatgtaagttattttctggggttgataacagatattttcgtatcgcagtatttgtcactcaggatgcacccactctgtgggctggatgattgcaatgctggtcatggatgctcagcgcggagatgtgcgtttgtctttgatatcaatgtaatttcccgagtaatggaatcctatttctgtgggttattttaagcaggaagatgaagtctccatctattggaataccgcgcttgtgtcatctgatgatggtgggttttttatttggaatttgtgtgcgtccaatcgatcagtggaggatgtcttggtattaatgttgagtagtataaatattaaaattcaatattaattaatgagtgaatttaggattaattttatataaggggtatgtgcggtgaatgctattggtggttcgagtggtttattttttcctgttgcggttccgcctctatgatttaaaggatagataacgctctatttaaaagtgttttcgcattgtgtggtgtcatttttcaaaaataagtttttaggatggcggtgccatcattgaaaagtatttgtgccttttttattggctgaatcatctatccatccattgctgttatatacaatttacggagagcagcagtcgcaaggggtgatgggatcatcgtttttgcatgcatcgccgtcggttgttggtattgcggtgatgtggtgtttctcatggctcagtgatgacagcatcctgtttcttctgcggatgttgtgtcaagtgaaggaataagtggcagatatttccggtatggggttgccgatatctatatcttgctgtcggtgaatggatgcaatcgtcatacgacggttgcgcatcctgatcttgagtcgtttattcaaggtggctatttctgttcgtatggaacagatgaggcgctgctggatagtttttttctatctaatgggtcagtcctacttaaatttttctttaaatgagatttttgtcacttctcatgttcggctttcttgggtgtgattctgaagagttgcgattatctattttataaaatccatataaaacaattatttatataataaatcgaataattttcataaatatcttcgtaacttgttgattattaaatgagtgcgtttgttaaatattgttaagatttttttcaaaatttcatgatgggtggaaaaaagggggtaatccaggttttttatggttttttgtggttcaataacccttcgatgtgggcttcttagagtcctgaaggtaattacgacggtgttccaaggtgagacagccattacgttggacgataaaggacgcatggtggtccctgcggtctatcgcgatctcatcgcgcgtatgagtgccaatcgtcttgtgttgacgtacaacccgtttgaggccggttgtctttggttgtatgtagaaaaagagtgggagcgtgttcgtgatgagctgatggtcaagcccaatgcgcatcgtgtggttcgggtactccagcagaagctagttggttcttcggcactattggagttggatgccaatggacgcattagcgttccgtccagtcaccggagtgcagttgctattgggaaaaaagcagtgttgctgggaatgggagataagttcgaactttggagcgagcaggcgcatcacgcattgatccagcagacgctctctgatggtgatttgggcgatggactactcgatctcagattgtgagtggggatggatgtgcgacgaggggtgcttggatggcttggcactgcacttgtcaatgactcatgtcccagtgctctacacccaggccatggaagggttgcgggtggttgaaaacggaacctatttggatggcacattcgggcgtggaggacacgcacgtggggtgctgcaactactaggccctggaggccgactgctagtgatggataaggatccagaagcgatcgcaatggctgaacgtgcgttcagctgtgatccgcgcgtggtcattcgtcatggcagctttgctttgctcgcgcagttggctgcgccacagtctttggatggtgtgttgtttgatctaggagtgtcttcgccgcagttggatgttccagagcgcggtttttcgtttgttaaggatggcccgcttgatatgcgcatggatccggagatgggggagagtgcggcgcagtggctggcacgtgtctccgagcgtgaaatcgctgacgtactttggacctacggcgaggaaaaacagagccgtcgtattgcgcgtgcgattgtcgcctaccgcgccaatcagccgttgttacgtaccgtgcagttggctgaattaattgcatctgtgatgttgcgcactaagtctggtgcctgtaaatccaggattcatcctgcgacgcgcagttttcagggaatccgtatccatgtgaaccgtgagttggtggatttggaggttggtcttgaagcggcactcgccgcgttgcgcccgggcgggcggttggtcgtgatcagttttcattcgctggaggaccgtatcgtcaaacagtttatcagtcgtcatgccaaggtgccgcctaccaatcgtcgcctacctgaggtgcagaccttcgtgccgttattacggatgatcggtcgtgcgatcaaggccgatgaggatgagttggaggttaacccgcgcgcgcgcagtgcggtgctgcgggtggctgaaaagttggatgtgttggaggcggtgcgatgagccgtctgctgttgattattctgttggcttgcacggtcgcttcggcgatcggtgtggtttacatgcgccatctgcatcgaaagttattcgttgagctgtcccatgccgagcgggtgcgtgatgatctgaatattgagtttggtcgattgcagttggagcaagcgacgtgggctgaagctaatcgggttgatcaggttgcacgtgagcgcttagggatgagattccctgaaagcaaagagatcgttgtggtgcgtccatgaagagccgtaataaccgcttccgcagtcatttcaatttgcgtggtcggttgttgctggtcggtacagcgctgggcctgtgttcaatgacgttgatcgccagtgctgcctacgtgcagttgattaatagtgatttctatcaacgtcaggcggaagcgcgctacttgcgtgagctgccgattccgacctcgcgtggaatgattacagatcgcaatggtgagccgttggcggtttctacgccggtggagtcgatttggggaaatccacaggaactgttgcggaatcctgatgcgatctcgaagttggctaaggtacttgatgtcccgatggacgaactgcgtactcgtttgtcgcagaaggccgataaagagttcatgtatttgaagcgccggatcaatcctgacgttgcacatcacgttcttgggttgcaaattcctggggtatttgcgcagcgtgaattcaggcgtttctaccctcagggtgaggcaatggcgcatgtattgggttttaccaatattgatgaccgtggccaggaaggtctggagctgtcatttgatgattggttgacaggtaagcctggtagcaagcgtgtggtacgtgatgcgcgtggcgccattgtggagagtgtggatgcgatccggtcggcgcagccgggtaaggatttggtgttgacgattgatcgtcgtattcaatttcttgcttataaggaactgcgcaacgccattgttgaaaatcaagcggctggtggttcgattgtcgtcatggatgtgaacaatggcgagattctagccatggtcaatttgccgacctacaaccctaacgcggtgaccgggattaattcttcagcacggcgtaatcgtgcggtgacggatctggttgagccaggttcgacgatgaagccgttgacggttgcgaccgcgctgcaagcgggtgtggtgacccctgatacggtcattgataccaatcctggttatctgtcactgggacgttttaccatccgcgatgtgccgcgtaataacggtgtgctcaatgtggctggtgtgattacgcgcagttccaacattggtgctgccaagatcgtcgccaaggtgccggacaaaacgttctacgaattggtgcaaggttttggttacgggacagcgcctcatagcggttttcctggtgaatccagcggtgtgttgcctttaccggcacgttggagcggtacttccaagaccactatgtcttacggttacggtctgtctgtgacgccgttgcaaattgcgcaggcgtacgcgacgttgggcaatggcggcaagctagtcccgccgacgttcgtcaaaggccatcatgccgaggcacgtcaagtcgttgatgccaaggttgcacagcaagtgattggcatgatggaaacggtggtcacccgtggaggggctaaggctgcggcgatccttggctaccatgttgctggaaagacgggcacggcgcgcaaaacgggcgctaatggctacgaatccggtcattacaatgcgctgtttgctggtttggtacctgccacgcgcccgcgcttcgcgacggtcattgtgatcaacgacccgcagggtaaggcgtattacggcggcttggtatctgcacccgtgttccatcgggtgatggagggggcgttacggttgatggatgtgcctcctgacgacattcaatcatggttggctgcgcaggctgcaggaaaaactgggcggacgccgccgcggcaggtcgatcccgatccggcattggtacccgatgctgtcgatgaggtggccgctggtattcctacgacggtgacaccagctccgtctgcgattcagagaaatcgccaatgaggcgttctatgccattggcgcagctattgcccgatattccgcaagcgcgtgatgtcgtgatctctggtttggtgatggatagccgtgaggtgcagccgggtgatgcgtttgtcgcggttgcagggttcggcgctcacgggttgtgttttattgaggatgcgtgtgccagaggtgctgttgcaattttgtttgagccgcccgcaccgcagggggtgtcggtgccggatggggcgattgcagtgcatggtttgcgtgcgcgtttgggtgcgatggcggatcgcttccacggccatccgtcgcaggcgatgaccatggtgggtgtcactggcaccaatggtaagacgtccactgtgcaattgttggcgcaggcttggcattgtctaggcgtgcgcagtgcgacctgtggcacgctcggtgtgggtttgtacgatcaggtggtaccaacgggtttcacgacgccgctggtattgcaactgcatcagtgtctggcgcagctgcgtgacgagggtgctcaggcggtggcgatggaagtcagttcgcacgcccttgatcaagggcgtgtggacggtgtgcattatgacgtggtggtgttcaccaatctgacgcgtgatcatcttgattatcacggtgacatggagcactacggtgcggccaaggcgcgcctattcgcgcatcaggatgtgcaggcggcggtaatcaatgtggatgacccattcggtctgcgtctgttgcatggtttggccaaggggatgcggcgggttggagtcagcgtgtgtggtcacacggatgcagatgtgatggcgcagcatctgagtctgaatcttcagggtatcgggtttgatcttgtcatcggtgcggatcatgcttcggtgcgttcacctctgatgggacgtttcaacgttgataatctgcttgcggtggcaggtgttctttatgcgctgaattacgcgctgtccgagattgctgcggtgctgtcgacgttgcggccgattcatggccggatgaatcgtttgggtggtcaggatgggcagcctgtggtggtggttgattacgcacatacccctgatgcgctggggcaggtgttgtccagtttgagtagccacgtatgcggtcgtttgatttgtgtgtttggctgtggcggtgagcgcgataggggtaagcgttcacagatggctgttattgccgagagtaacgccgatgttgtgttcgtgaccgatgataatccgcgtggtgaggatggtgatggcattgttgctgacattctggccggttttgcgcgtcccaacgtcgtaaaagtgcagcgcgaccgctctgctgcgattgcggcagccattggtatagccagtgcagaggatgttgtgttgattgctggcaaaggtcacgagcgatatcaggaggttgctggggtgcgtcatccgttcgatgacactgaagttgctaggcgtgtgctggcagcaatgtcggcccaggagactgtccggtgagatctatgccactttcgttaattgcgcactggaccggcggttatctgcacggtgaggatgtcagggtgcgcgcaattggtcatgacacccgtgcgctggatgttggcgtattgtatgtggcgttgcgaggccagcgtttcgatgcgcatctattctgcgccgaagcggtggcacgtggtgcggcgggggtattggtcgatcacgtgttgccagagttggatgttcctcaggtcgttgtggccgatactgagcgtgcgcttgcggcgatcgcttcagccttgcagcgtgaccggacatcttttgtgttggcattgactgggtccaatggaaaaaccagtgttaaagcaatgcttgtatccattttggagcatgctgcggcacagagtagtacggtggtctacgcgaattctggtaaccgcaacaatgagatcgggctgccgttggcagtgattgccgcgccagatgatgccgattttgcggtgtatgagatgggtgctggcaagttgggcgacatcggttatttgactgacatcgttacgcctgatgtggcgttggttaataacattgcaccggcgcacttggagcgcatggggagcttgcttggtgtggcgcgtaccaaaggtgagatctatgccgcgttgcggcctggtggtaccgctgtgatcaatatggatgatgcgtttgctttgtggtttgagcagcagtgtgttccggctggttgtgctgtgttgcggttcggtttgcaggcaactgctgacattactgcgtatagcctgcaattcagtgaggacagtgtgcgttttgtacttgtgacgccgcagggggaggtgccggtgtgcttggcgctctctgggcgtcacaatgtgtgtaatgcgctggcagcggcagcaatggcgttggttgccggtattccgttgccgcagatcgcggctggtcttggtttggctcggtcggtgcccggtcgccaagttgcgcatgctttacccggtggtgcggtattgattgatgatagttacaacgccaatcctgggtcactggatgtggcaatcgatacgttgacgactgctgccggcccaggatggttggtgcttggcgatatgcgcgagcttggtttggagggggtggcgctgcatgccgctgctggacgtcgtgcacgtcaagccaaagtagcccggttgtatgcactgggtgagttgagtgcagttgcggcgcgggagtttggtgagggtggacatgtgtttgccgatcatgatgcgttggctgcggtgttgtgggatgacttgaggcatgtaccagatggggtgctgccgcgggtgcttgtgaaggggtcgcggggcagtgcgatggacaaaattgtgggcgctctgttgtcgagtgcggagggcgtagcgcatgttgtttgagttggcccgttggttgcagcaatttgaaagtttgtttgggttgttcaattacctgacgtttcgtagcattttggcggcattgactgcattgtttttgtcgctgtggatcgggccggtattgatccagaagttgtcccagtttaaaggggggcagccgatccgtcaggatggcccgaagatgcatttttctaaagctggcacgccgacgatgggcggttcgctgattttgatgacagtgacgttgtcggtgttgttatggggggatttgcgtaatcgctatgtgtggttggttttggtggttatgttggcttttggggcgattggttggtacgacgattggatcaagcttgcgaggcgtgatccgaatggtctgaaatcgcgttggaagtatctgttgcagtcgatctttggtttagctgcgggcttgtttctttactttactgctgatgtgccggcggcagtcactttctatatccctatgttcaagtcgatcgcattgccgttgacgagcattagttttgtggcgatcacttatttttggattgttggtttttccaacgcggttaatttgacggatggtttagatgggttggcgattatgccaacggtgttggtggcgtgtgcattaggggtatttgcttacgcttcggggaataccttgttttccagttatctgaagattcccacgattcccggtgctggcgatttaatcattatctgtgcggctattgctggagcgggtcttggttttttgtggtttaacgcgtatccggcgatggtgttcatgggggatatcggtgcgctggcattgggtgcagtgcttggcacgattgcggtgattgtgcgtcaggagttggtattagtggtgatgggtggtgtgtttgtcatcgagacgttgtcggtcattattcaggtcaccagtttcaagttgaccggtaaacgggtgtttcgtatggcgccgattcaccatcattttgagttgaaggggtggccggagccgcgcgtgattgtgcgtttttggattatctcggtggtgttggtgttggttggtcttgcgacgttgaaggtgcgctgatgaacgtttttatgccacagacagcgcgattcgaggcaatgagaggttcttacgatccgtggcttttgggtgctgccgtggctttggcttcgctcggtgtggtgatggtggcttccagttcgatcgagctgacggatagtccgttttattatctgattcggcacttggtgtctttgagtatcggtgtttgtttagctttttgggtgatgcgtactgagcttaagaaggtggaacagtacaaccgtgtgcttcttttgatctgctttgtgttgctgttattggtatttgtgccgggattgggtagcagtgttaatggtgccaagcgctggattaatttgggtgtgtccaagtttcagacggttgaggcggtgaaggtgttgtatgtcgtttggttgtccagttatctggtgcgtttccgtgacgatgtcaatgcgacttggccggcgatgctgaagccgctgagtgtggttgcgctgctgattggtttgttgttgatgcagccggattttggttcttcaacgttattgttaggcattaccgcagggatgttggtattgggtggggtgaatctgccaaagatgtcgatgccgattcttgcggcgctggtggcgctcatcgcactcgtggtgttcgagccataccggatgcgtcgtatgacgtcattcatggatccgtgggctgatcaacgtggttccggttatcagttgtctaatgcgttgatggcggtgggtcgtggtgagtggttcggcgtggggctgggtgcctctgtgcagaagctcaattatttgcctgagtcgcatactgattttatcttttcggtgattgcagaagagctgggttttgttggggtatgcagtgtgatcgcgttgtatacattgctggttggacgtgcgttctggctggggatgcgttgtgtggagatgcggcgtcatttctcgggttatgtggctttagggattgcgttgtggatcagtttgcagagttttgtttcgatcgctgtcaatctgggtatgttgccaacgaagggtttgacgttgccgctgatctcttccggaggttcgtcggtaatgatgacctgtgttgcgatgggattgttgctacgtgtttcttacgaggttgatcgggcggatcgattgcgcaaaaaattggtgtctggtgcggatgatatgttgctgcacgatgttgttggtgctccattcgccgcatcgcagcagggggtgggcagtcagatgcgctccagcgtggcatcggtgttcgggaaggtgctatgagcatagtggctcaatctgcagtgacgcactttcgccccgtcatgattttggctggtggtaccggtggtcatattttccctggtttggcggtggcaggtgcgttgcgtgcccgtggtgtaccagtggtatggctgggtgcaaccggaaaaatggaaacgcatttagtaccaaagcacggtattgaaatacaaaccattgcggtttccggtgtgcgtggtcatggcatgttggcgttgctgggtacgcctgtccgtgtgttacctgcgatttttgctgccatgcgggtattacgtcggtatcgcccacgtgtggtggtcagttttggtggtttcgcggcaggtcctggcggtattgcagcacgcttgatgggtctgcctctgattgtgcatgagcagaatcgtgcgcctggaatgactaataggattttggcacgtgttgcgagacgtgttctatcgggttttccaggcagttttgttgctgaggaggtggtggggaatccagtgcgtagggacattgctgcgctgcccgcaccaggagtgcgttttgctggccgcagtggtccggtgcgcttgttagtgcttgggggcagtcagggggcacgtgtaatgaatgatgcgttgccggtggtgttgcgggtgttgtctgatgctgatgtggctgtggaggtgcgtcatcagtgtggtgaagcgttgcgtgctgaaacggagggtgcctatgcatacgcaggtgtggctgcgcgtattgaaccgtttattagtgatatggctgcagcgtatgcctgggccgatttagtggtgtgtcgtgccggtgcctcaacgttggctgagttgtgtgcagccggtgttgggagtgtgttgataccgtttcctggggcggtggatgatcaccagaggcgcaatgcggaatatctggttgctgctggtgctgcgttgttgttgttgcagcaggaccgtgcattttatgtctatctggagtcggtgttacgtgatttgttgtctaatccaatgcgtcgcttggcgatggctgaggctgcacgtagattggctaaatctgatgttgcggagtgtattgctgaaattattcttaaggaatcgatatgaggcgcggcgtcgtttccaaaatggttgggtgtcgtgctcaaagtgagtgctgtttgtgattcgtcgtctccaagacaatggcgatttgatccgtgctttcccacgtgtgcattttgtgggtattggcggtgctgggatgacgggtattgctgaggtgatgctgacgttgggttacgaggtgtccggttctgataatgcggataatgccgcgacccgacgtttagcgacattgggtgcacgggtgatgcgtggtcattcagcagccaatgtgcttggtacagattgtgtggtggtatcgagtgcgattcgcgaagataacccggagttgatggaggcgcgtagtcagcgtattccaattatgccgcgtgcggcgatgttggctgagttgatgcgttttcgccacggtattgctgtggctggtacacacggtaagacaacgacgacgagtctgattgcggcagtgctcagtgagggagggttagatccgacgtttgttattggtggtcagttgcttgctgctggtgctaacgccaagctcggtgctggtcaatggttggtggtcgaggcggatgaaagtgatggcagttttctgcgtttgaatccgcttgtggcggtggttaccaatattgatgctgatcatctggagaattatgggaatgatttttcccggataaaagatgcgtttacggaatttttgcagcgtctgccgttttatgggttggcattgttgtgtcttgatgatccagaggtggcggagttggcgggcaaggcgagacgtcatgtgatgacttatgggattgatgctgctgctgatgtgcgtgccgaagatgtggttcaagatggtgcacggatgtgtttcacgctgtgtcttcctgagggcaaggttattccggtgacgctggcgttgccggggcgtcataacgtactcaatgcgttggctgcttctgcggtcgggtggcagttgggtgtgccgccagaggtgattgggcgtgcattgaagagttttgttggtatcgggcgtcgcttcaatgatttgggggatgtcgctattggaaatggtgcatgtgttcgtttgattgatgattacgggcatcatccgcgtgagttagaggcggtgtttgcagctgtgcgaggggggtggccggataagcggttggtggttgcgtttcaaccgcatcgttacagtcgtactcgcgatcagtttgatgcgtttgctgcggtgttgagcagtgttgatgcgctggtattgagtgaggtttatccggctggtgaggtgccgatcccgggggctgatgctaaggcgctggcgcgtgcgatccgcgcgcggggacgcagtgagcctgtggtggtgggtcaagtggctagtttgattgaggtgttgccggatgtgttacaggagggggatttgctgttgatgatgggtgctggcgatattggttccatcgcgcagcggattgctcatgatggttttgtctttggagaggtttaaatatggctatgagcatattttctctgtctccacggtatacggatccggcggtgtttggtcgtgttgcagtgttattagggggcacgtctgctgagcgtgaggtgtctttgctttcaggtcgtaatgtgttggaagtattgcgcgtgcgcggtgttgatgctcagtcggtagatggggttccggcactcgctcaggcgctggtcgaacggcgttttgatcgtgtgttcaatgtgttgcacggccataatggcggtggtgaggatggtgtggtgcaggggttgatgcaggcttttggtgtgccgtatacaggttcggatgtgcttggttcagcgttgagtatggataaggtgcgcactaaacaggtttggcttgcgctgggtttgccgacgccgcgttatgcgagtttgagtgtgtgtgccactgctgttgaggtgcgtcaggcggttgagatgctgggttttccggtgattattaagccggccaaagaggggtctagtgttggtgtcagtcgtgtgtttgcgctggagcatttggaggaggcggttgctttagcggcgcgttacgagggtgagttgctgatggagcagttgatcgaaggggatgaattgacggtgtcgattcttgatgagatggcgttgccgtcaattcggatcgttcctcaggggcagtggtatgactataacgcgaagtatcttgctgaagatacgcagtatgtgtgcccgggtttggatgatgttgctgaggcggaaatcgctcgacttgcgttggctgcattccgtgctgttggctgtcgtggttggggtcgtgtggatgtgatgcgtgagcgcggcagtgggcgctttttcttattggaagtcaatactgctcctgggatgacgactcattcgttagtgccaaaggcagcgagtcaattgggtatgggttttgatgatttggtgtggcggattctggagcagactctatgagttgctttggtatccgtatggatgggtggcagaacggctgtgcatttggtgctggaagtgcggtagtgggtgtgttttgggtgtcgcgcgttttgagtgttttcatatgaatgctgttctgcgcattctggcttggttgttggcggtagggttagtggtcttgccggtggtcgctgtgctcaatggttgggtgggtgctgagcgttggccgttggctaagttgcgtgtcagcggggattttaagcgtgtttcaccggaggagttgcgtgcagcggtgttgccttatgtgcgttctggtttctttgcggtgcggttgccgcaggtccaagatgcaattgagcgtctgccgtgggtggagcgtgctcaggtcggtaagcgctggccagatgtgttggaggtcagtgtggttgagcatcagccgtttgcgcgttggggggctgaccgtatgttgtccgagcaggggcggttgtttcctgtgccaggaggacttaagagtctgaagttgcctcagcttggggggccagacatgaaggtccgtgatgtggtggcgctttataaggcttcgtctgcgctgtttgcgtcgactgggttggatgtgagttggttgcagatggatgcgcggggaagttggtctttagggttaagtaatgggttacagatttttgttggtcgtgatgatgcaagggcacgattggaacgttttgctcgcgtgttgccgcagttgttggatccgcagcgtccggttgtgcgcgctgatttgcgttacaccaatgggttcactgtcgtgcgtggtcaggcgtctgttgctttcggcgtggagggcaggttgtctgaagcggtgttcgtttctgtattgcagcgggtgacgtcgtccgtgcagtgtgggctgcagcggttcatggcgtttcagtccgtattccctatctacggatttagtacatgaatcgtaaaggtgagaaatcattgattgtcggattggatattggcacttccaaagtggttgcgttggttggtgagtattcacagggcaatctaattgaggtgattggtatcggttcgcatgaatccagggggattaagcggggtgtggtggtggatattgagtctacggtgcagtcgattcaacgcgctgttgaggaagcggagttgatggctggttgtgagattcgatcggtatacgcttcaatttcagggaatcatgtgcaatgtaaaaattcgcaaggcattgcgccgatccgtgatggtgaggtgacttggaatgatctggagcgcgtgcttgatgcggccaaggcggtggccattccggcggatcaacgtattttgcatgcgattccgcgcgagtatgtgttggatgattcacaggaaggtattcgtaatcccgtcgggatgaccggtgtgcgccttgaggtgcatgcgcatttggtggtgtgtgcgcaatccgctgcggccaacatcatcaaatgtgtacataagtgtggtttgcaggtggacgatttggtgttgtcttctttagggtctgctgtcgcggtcttgacatccgatgagcgtgagttgggtgtggtattggttgatattggcgctggtaccacggatttagcggtgtatgtgcatggggcgatttgccatacggcttctttgccgattgctggtgatcacgtgaccaacgatattgcgcatatgttgcggactccaacgccggaggctgagcagattaaggtgcgttatgcctgtgcgttggctcagatggcgatggctgaggagtctatccaggtgccgtcggtaggtgatcgcccaccacggcgtatgccccgtgcttcattggcgcaggctgtgcaagggcgttatgaggaaatctttgagatggtgcaggctgaattgcgtcgttcgggattcgaggagttggtccgtgcaggcatggtcctgacgggtggagcttcgaagatggagggtgtcgttgagttggctgaggaaatgttgcaaatgccggtgcgcgtcggcattccacagcatgtcactggtttgggtgaagtggtcggcaatgctgtacatgcttctggcgtggggttgttgctgatgggcagtcagatggaacgcccgcgtcgtccatcgttaccgactgggcgagtgggtgcttttttcaagaagttgaagaattggtatcggggcgaattttaatcggttgatggaaagagccggtttttttcgcaagggtaatagcaagggcatggataggcgccgtaaggcgtggcaataacatcaaaccaaaaaatgccgtcggggttccgagttcaattttcagctcgttttctcgtcggtacggcaagttacaattgaggacatggaaatggcacattttgaactgattgagaagatggctccgaacgcggtgattaaggtcgtcggtgttgggggcggtggcggtaacgctgtagcacacatggtgaatagcactgttgatggtgtggagttcatcattgctaacactgactcacaggcgattaagaactgtggcgccaagctgcaattgcagcttggtgctaacgtgactaaaggtctgggtgcaggagcaaatcctgaggtcggtcgtcaggctgcactggaggatcgtgagcgcatcattgatgcccttcagggggcggatatggtgtttattactgctggtatgggtgggggtactggtactggggcggctcctgttgtggcgcagttggccaaggagatgggggttctcacagtggctgtggtgaccaagcctttcccgtttgaggggcgtcgccgaatgcaagtggcgttgaaggggattgaggagctgaatcagcattgtgattctctgattactatacccaatgagaagctaatcaccgtgcttggccgtaatgcgacgatgattcaagcttttcgtgccgctaacgatgtgttgcaaggggctgtgcagggtatcgctgatttgatcgtgcggccaggtttaatcaatgttgattttgccgatgtacgtaccgtgatgtctgaaatgggtctggcgatgatgggtacgggttcggcccgtggtgatgaccgtgctcaggctgctgcagaggcggcagttcagaatccgctgctggatgacgttaatttggctggtgccaacggtattttggtcaatatcaccgctggttcggattttactatggctgagtttgatgagattggtcgcaccattgatggcttcgcttctgaagatgcgacggtggtggtgggtactgtgcttgatcctgagatgcaggatgaagtgcgcgtcactgtggttgcgacgggcttgagtcgtactgtgtcacgtgcggcgcagccgcgtccggagcagcagcgcgcgtcagtcaagcttgtgcgtaacgcgactaccggtcaggctgaattcggtgacctggataatatggggggggcagtgtcccgagcggtcggtgggtccttgggtttgggctttgggttgcgtcgatccggaactgatgcagtgtctggttcagctccttcggcaccagtgactgctgagttgccgagcgattatctggatattcctgcatttttgcgtcgtcaagctgattaatgcttgcatggttatcaaagtggcttaccgatggctgatgaagttgttcatggtcaatggagtgtctcaagatgcgtatgaagtgatcttctgaaagtgcatgggatagtatcgaatgttatctcagtgaaggttatgtggagccgacgtttgctgcctggatgcagttgtcggctatcgcgtgcttcgccagtggtgcacgctttataccctagtctacaacgcgtctgcgtctcggtcgtttcggctgccgggggtgcccattgttatttctatgtgcttgtactgctaatatgagggcattcatcatattgctactaaatacggtggcactaatttcttgccctgctttattttttcagacttccgcctatgagccagcaacgtacccttaacaacacgattcgcgcgactggcgttggtctgcacagcggcaataagatccatatcaccctccgtcctgctccggtgaaccacggtatcgtgttccggcgcgtggacctggatcctgtggttgaaatccctgctagtggggatttggtgaccgaggttatcttatgcactggtttgacgcgcaatggggctaaagtacagacggtcgaacatttgatgtcagcctttgctgggcttggtatcgacaacgctattgtggatctgtcgtcggctgagttaccgattatggatggatcttctgccccgtttgtattcctgttgcagtcggcgggtatcttagagcagaacgctgctaagcgtttcatccgcatcaagcgttctgtggaggtgcgccaaggggataaggtcgccaagtttagcccttacgatggttataaattgggttttaccattgagttcgatcatccaatgatcccgcataaacagtcgcattatgagatggagttttctactgcagcttatatcaaggaaatttctctggcgcgcacttttggttttatgcatgacttggaagatatgcgtgagcgtaaccttggactgggtggttcaatggacaatgcgatcttgctggacgacttccgtgtgctcaatgaggatggtttgcgctatggcaacgagttcgtgcgtcacaaaatacttgatgcaatcggtgatctttacttaattggtggcccgattttgggggcttatgaggcatttaagtctggtcatgcgctgaacaataagctggttcgtgctgtacttgccgatgagacttcttgggagtggatcagcttccctagttcagccgctgagcagccgcctgtcgtctacacgcatcccgcttgcatttgaatcattctcagaaaacttgacgatatgattcttcatcaatgatttcttaatctacaaataacgaatcaagagccgataccagttactatgcgccaggtcgcctggttccaatgccgtaaattttcgcgattaagtaaaggagtcatcggttctcggatttcagtttttctgcagatgcattggtccataaagggattttaacgcttcttgtaagcctttaggcattgttgcattaactgcttcgtttttttcctttacgcgttctttagtaaagggtaaagcagacgctaacgttttgatgcttacctgagtggccatgagtcctatggatttggccgcgtctagaagctgagattcggaaagtcgtaattttgtgtgccaagcaggtgattcgaccagaaaaacaagttttttaccattgacgttggccaatcggcattgatttgccagcgtttctggcagataggagcgcagctgctgatccagcctatcgagccatatggcccgatggaaggtggggacagttttttcgttcagtaccgcttcaatggcggtctgaaagggggaagggctgttagcgttggatttcagattagacatgaaaaaaatcgtatggcattagtaaaaagaattaaacttaaatcgtatgaaacccgatttgagtgctgtgtccgtcggttccgcgacttctcagaggagcgtccgttcattatattaggggctgtattagggattggtttgctcagtggtattggtactggtgcagcgttggggatggtgagcaatgtacggttgcaagctaagtttcagcagcagagggctgagttggaacacattcgaggcacctccaaggcgcaggtgaatgcgttggctgcgcgtctgggggagttacaggctcaggctaaccgccttaacgcacttggtgcacgtttgaccgaaatgggtaagctcgggaacggtgaattcaattttgaggctccagtgggtatcggtggccctgaaactccagcaaatgatatgcctgtgcaggatctcaaggagagtttagggcaacttgagcagcaattctctagttctggtcagcaactgagtgtgcttgcttcgttattgtttaataatcagcttgaacaaaatgcggtcccttcgcgggcgccggtccgcaactcctacatcacttccaattttggtcgtcgtgctgatcctttcaatggcggtgttgctgaacataagggtgtagactttcacgcgagtgtgggtagctcggtcatggcagtggccgatggcgtggtcagttatgctggttaccgcaatggctacggtaatgtggttgatgttgaccatagcaatggttatttgacacgttatgcgcataattcgcgtctgacggtcaaggtcggcgatctggtccgaactgggcaggaagttgccaaagcaggctcctccgggcgctccacaggagctcatgtgcattttgaagtatggaaggatggggtggtgatgaatccgatcaaattcctcggtaatcctaggggactacagtgggcttctaccaacatggttgaaagacagtgacattaggttgaatttacaggggctgccccgatctacaatatggcttgactacgaacagggtgcggtgcgccctgttttgctgatggcgttgggataccctaatgatccgacgtctaataaaccgttccttttcaaccggtttcctcaatgatcaacagtctgcttacccgtctttttggcagtcgtaacgaacgccagcttcgccaactaaactccatcgtagctaagatcaatgctttggagacggagttacagaagctttccgatacggcgctccaggccaagacaaccgaattcaaacagtccatccaagatggcaagtcgttggataaattgctcccggaagcatttgcagtctgccgtgaggccagtcgtcgtgtgctgggtatgcgccactacgacgtgcagttgatcggtggcatggtgctgcatttgggcaagattgccgagatgcgtaccggcgagggaaagaccttggtagcgacgttgcctgtctatttgaatgcgctggcaggcaatggtgtacacgtggtcaccgtgaacgattatctcgcccgccgcgatgccgctcatatgggcagactgtacaattggttaggtttgagcgtcggtgtggtttatccagggatgccgcacagcgacaagcacgcggcctatggtgctgatattacttacggtactaataatgagtttggcttcgattacctgcgggacaatatggcgttgtctaaagcagatcgttaccagcgcgggctgcactatgcgattgttgacgaagtggactcaatcctgattgacgaagcccgtactccactcatcatttccggtccggccgatgagtctccggatctttacatccgagtgaatcgcatcattccgcatctgacccggcaggagaacgaagaagcagagggtgattactgggttgacgaaaagggcaagcaagtgcatttgtccgaggtcggcatggaacgtgccgaggagctgctgcatcaggctggtattttgggggaagaggatgacagtctgtatgccgcgcagaatctgagtgtggtccaccaccttaatgctgcactgcgtgctcatgccctttatcaacgtgatgtggattatatcgttcgtgacggtgaagtcgtgattgtcgatgaatttaccggacgcactttggcaggtcggcgttggtccgatggtttgcaccaggcgattgaagcgaaggagggggtgcctgtacaacgcgaaaatcagacgctggcctcgattaccttccagaacctgttccgtatctacaaaaaactgtccggtatgacagggactgcggacacagaagcgtacgaattccaaagtatctatggactggaagtcatggtcatcccgaccaacaggccgaccgttcgaaaagattatccggatcaagtctttcttaaccgcagtagcaagttcaatgcagtattggaagacatcaaagactgtgcgcaacgtggtcaaccggtcctggttggtaccacctcaattgaaatctcggaaatgttgtccgaacaccttcgcaaagccaaggtcaagcacgaagtgctcaatgctaaacagcacgagcgtgaagcgaccattgttgccaatgctgggcttcctggcgcggtgaccattgctaccaacatggccggtcgtggtaccgacattgttcttggcggttcgcttgatactgtgctggctgaacttgatccagatgcgaccgaggaagatcggtttcgggtaaagacggcatggaatcgccgtcacgaggcggttaaagccgctggcggcctgcacattataggtaccgagcgtcacgagagccgtcgtatcgataatcaattacgcggccgtgcaggacgccagggtgacccgggttcgtcgcgtttctacctgtcccttgaggacagcttgatgcgtatcttcgcttccgaatgggtgcagaaggtgatgcgtttgatgggaatgaaagaaggcgacgtgattgaggatcgtcgagtgactcgccaaattgagagagcgcagcgtaaggttgaagctcataattttgacatccgtaagaatttgcttgattacgacgatgtcaacaacgaacagcgtaaggtggtctacgctcagcgtgatgaactgcttgatgccgaatcgattaaagagaacattgatagtatccgccacgaagtgattgacgctttggtgacgcgtttcgtaccagaacattccattgacgaacaatgggatttgcctggcttgcaggcaaccctacagagtgaatggggcttacacctgccgctgatagagatgctcaaggggcgcgaggaagtcgatgccgagcggatcgcttttctggttcaagatgcagtggataaacattgcgctgaaagagaggcatctatcggtgctgagaccatgcgcgccctggaaaagcatgtgatgttgactgtgcttgaccaagggtggaaggaacatctggccacaatggattacttgcgccaagggattcacctgcgcggctatgcgcaaaaacagcctaaacaagaatacaaacgtgaggccttcgagcttttttccgaaatgttggagcatgtcaagcgcgaggtgatcgcctcgctagcgcgggtgcgtatccgtagcgaggaagaaatggccgccctggaagagcaagagcgtcgtcaggttgacaccctgttacgtcaatcgcagtttcagcatcaagaagcgggcggctacggtaccggtgacgaagctgtttcgttacagcgtcagcttgccggccaaggagcggctatcgcgcaggtcattcgtgatacaccaaaagttggtcgcaatgacccttgcccttgcggcagtggtaaaaagtacaaacattgccatggtctggtgacttgaatgtcagaccctcaaacttgaccagatgcctgagtggcaagctgttggggggatcacctgtattcgatgatttccatgcagaatcgcagtggcgcttattggcgttgttgcgtttcgaacacgctgttttgaaatcgttgcggtaaccaaactgctgctgttgatgtttttttcttaagtattggagagtgaccgcccagcaaagtgtggtacggctactctcccccaacaatacgcttcttcgtatatgttctacgccccccttcttcttgaaagtgagtgtagggattgcatttttagatcccattgcaacgcagcgtaacgtttgtacatgcacatccataccgtgtgtttgatggccaatccactctcgggcgatgcctgctgctatctcctatttcttgttgggccgccacgttgccattccaattcccttgaatgacttcgttctttctccgtattgcttgtagtcgttgctaggaattagcttggctccgtaatcactagccatcgcgtcctattgactgctttctttgtactgcggatgccgtcggtttgcatcctgacatactgacgtagagaactccgttgctgcagtgaaagcgtgtacggagcagcgtgtcatctgtcctagcgtggtggatgttgcgcatcaggttgcagcgataatagtgatgcgtccatttgagcagcccatctcttttaactttaattttccattcaatcagtgatgcaacggcctaggtacggatatgatcgccgtggttgatcgcaattcccccatagcgctgtgctatgggcactgttgtgtatcagttcaacacagatgaggtatgagatgcggcgcttggcaatcttattttggcttgcaacatctggttgcgtggcctcagccatgtacggtgaaacgatggatgcacaaaatgcagtgtctgatactcactttgttgagccactccacggcgttaactggcgtggtttagaaacggcgcagcacctgctgcaaggtttagatcaacgtccctggcgtgaagtactcgaccaaatgcagagcctaggcattaacgcaatacgcttgcccctgtgctcggacaccctacatggcaccatgcctaccaatctggatctagtgcgtaatccagatctcaaaggacgtaccgcattgcagattgccgacgcaatcattgatgaagctgggaaacgtgggatgcgggtcctcctggcgtatcacggcgtggagtgtcctaccgacggaaacccattattgcgcagcgtagatgaatcagagcaccaatggatcagcgatgtgcaattcatcacctcgcattatcgtgctcaacaaaaagtggtgatgggcgtggacttggccgacatggcaaaccatcgcccctttcagagcggtggtgatagcacgcctgattggaaccgtgtcgttgagcgtgccgctgctgccattctggcgatgactcctgaatggttgattggtgtgcagcctgttggcctgaatcccccatgcttggatgcgtccgctcctatctccgatgacaacatacaatcccagcattgtgtcccgttacgcattcctgctcggaacctcttgctcatgccccacttcgcgggcactgacattgatactgaagctgcgcttggcgcattttcgggaaagcaaaccgtgttacccaactccctggatgccacggatgcggagcaactcgcccatcggattgatgcactgctggcattcggcatacgccaaggcttttatggctcttggatgacctcagcacagatgccatttggcatgcttgataacgacggccgtaccccacgtaccgcattgattgcacagctacatcgttggtggggtgtgagccgtgtcgatgttgctagtgagaatgctgcgaccaagaatcaaacaacgaccgataccaatggatgtgttgctagtgataacagcgtcccgctcaatggttgggacacctccttcagtggtgtcgccacctatacctatacgggttacaaaggcggagcattgatgctggatccgattcagtcccatgcgcagatcactgcacttaatcccattcaactcaatttgggagggattcccgctgcgatggctggtgcttacctgcgtgtgcagggtccgaagggaagcacaaccgtctacgtgacggaccgatatcccaccggatcttctggagcattagatctttcaccgaatgcctttgccagtatcggcaatatggctcaagggcgtattcccgtgcaatggaaggtcgtctcagcaccggtgagtggcaacctgatctatcgggtaaaaaagggaagctcgggatggtgggcagcgatccaagtacgtgaacatcggtatccagtgctcaaacttgaaatctgtcaggatggcacctggttgaatttgccaaagagaaattacaactactttgttggtacccgattgggtaaccaaccgttgtcaatgcgcatgacagatattcgtggtcagaccctgattgatacccttcccgccttgccaaagcgtgcttcctcaaaagcatattctgtgaatggaaatgtccagttttccgaataaaaacgtgactgacagctcagcctgttctcctacctgagaggtgatcgcctgaacagcttaatgacgtctctaaaactgctttaagcacactgaccttggagcgctccgcagttgcctaacgacacactccccctcctgattgctgaagagcaggttccccttgtggtcgcagcaatggcataccgaaagtcaatgagagtgtgccgagtatcctcctcatcaccctgacccactgctgtgagtcactagtcccgtctcatcatttctgtacaatgcatattaacggcgttgtgccagcaccccatccaggatcagcgtgctttggaaacccgcctgctccaggcgtcgtgcgatctcacgcggcacatcacggccatgactcagttgagttggtgtgccggtgtagtggaacatctgtccatcacggcacagtacccgtgccaactgatcgtaaaaacgtagcgcgtataactccccggcaatactgaagcgtggcggatcgtgaagaatggcatccacgctggcatccggtagatcctcaatggcttgcgcaatgtccccaccaaccaactcaaggcgctgattagcctgtatcgcctgaggatttggagaccaaggattgagcgtgcgtagccaaagaacatcaggattcttttcaaacgaccggatgtgaatcgccccggcttccagacaacaggctgcgaaatagccgagtccaccgcacgtgtccaacaccgtcttcccttgtggcctgaccagagccactttgcgtcgtgcgtcctcgaaaggagacacacgcaaggacggtaacatcttgatgccatcaatctcgaacgtcggtaccccccacggagtaggcactaacttgatgagcgagccgctgaaccgcgaaattgcggtgaagttttgaccatcccaatagtaaatcgtgcggtctttcaatcggttcggatacggataagtgtgtgttttggcatgccaagcatcggtagcgatccgtacttgcgtatgcgtgcgccccaagtccaaggagcctgaccaggtggccgtcccgcggctgcgggcctcctgcagcgcatgaccaatgtcccgggtcagcaacggcccggtgtagtggggtgtcttcatagaagctggcatgcctgcttggcaaaaaagaagcctgggatcctacccgagccagatgcaggtgagtagccgatctgcttgggtattgcgctgtgcttacggcacatccttgatagcgacatcactgcattggctgtgccatcctcatacatagcatacgcagtgccggtatatgtggttgatttgcgtcccgacaccagcgacaccaacgatgaatagataatatacctgtcgcggcggaaacgattttgatcagctgaatcgtttccatattgtattgtccatcgtgtcgacaccatgtcggctcctgttttcggtgaatgaaatgactccatatgaacaaaagcttcttgatgactttttgacacgactgcgtggtgccggagagagcgtaaaagatcctcaagccgaagcgcttatctgcgagcgtctcgctggccatcctgatgcagcctatctcttggtgcagcgcgcgttattgcttgaacaagccttggcctcagcgcaaacccagattgcaaagctgcagcaagccgctgccggacatgatgcgggtgctggcagtggcagtttcctcggccaagctgcttggggaacgcagcagaccgccccgcccacagtcgctcccccgcctcctcccgcagcacctccgagctggcgtgagcgtctgtttgggagtactccagcgccagtgcagcaagcggcgccctcggctgcaagtagcttcctcggtacggctgccagtacggcggcgggtgttgccggtggaatgttcttgtttcagggattggaacacatgttcggtggtcaccaaggccaaagcgggggactcttcggtaatgccgacaacacaccacaacagaccatcgttgagaatgttgtcaccaacaactactacgataccggcacatccataagcgatgcgggcggtttcgctgacgataccgatctattcgacaacgataacgatacctgggtgtgagattggcacagggtgcgtgtggatcacacgcaccctgtgccgccgtctgcgcggcgcaccacgtgatgcgctgtccctgctttaacctctgagtctgagcacacatccatgcaacccgatgtcacgggtgagacaaaagacggaggtctgttacctcgtatcgtgctggtgttgtgaagatgtcgctttggggtgacacaccctctgatgatcctcaagaaacaccccacaggatgaaaacaacatcgctttgctgcagccaaagccatttcttcatgggtgtttgctgctgctccgtgagggggacacgatatttttcgatctgaggccgcgtcgaaacaatcgtgttaatgctgctgaagtgtgcgatgcacatcgcatccctacgtttgttggtgaatgattatccgtgccctatttctgcaccggggttttcgatgacatatgaaccctcctcaagacacacaccctgctgatgacagcctacccagcccttgtgttgcatgctggcatcggattcgactcacggacagcgacccagccatccgtaaagcgattgactgccttgatatggatgagatgccgcctttccaggaacgatgctgaagctgttattggagtgcagcgctgtgagcatattccgctgcgcagagaagggacgttctcgcttgcatatgtgcgcgatgcgtcccttccccctgcctgctgtgtcaatgtctgattccagacattcaatgcgttgagactgagttaccgtcgttatccaggacttgcacatcagccagcttcagggcacggaccggtgcctcaatggtgttgaggtcaccgatgatgacccaggtcatcgcatttggattgatgatgcgttttatggcgcgctctacactgattgactcaatggcttccaagcgtggtttgagagtctgtatatagttgtctgggcgttcgtaccggacaatgctttccactgcgtccaacactgcgccgctggtttcataactgcccggcaggctacggataatctgttgcttgatcttgtcgacttcttcttgggtgagcggtttgttaacgatcacgtcttgtgcctctttctgtatctctgcgatggattcggccgttttgtcggtttgtacgggggcgataaacacgtaaggacgttgcccctgtgcgttggggagcacactacttgcaccataagcccaatgtttttcctcgcgcagattcatgttcaggcgtgaactgaaggtgcccccgaacgcctcgttacctacattgatttccagattagccggatctttcgtcggaggagccaacagaccggcgagaatcaatgactgctgcgcttctggacgatggatcaggaagatacgtggtttgaactgtgcggccacatctgtaatctgcttgtggcttttgatcgtgctcggagcttgccagtcaccaaaggcggcttccaactgcgggatgatggatttaagcgtggtatgaccggtcaccaggatgcgtacattgtctgggcgcagccagcgttgctggaaatctttcaagtctgtagccgtcagactttggatcgcttcattggtaccgctgccggtgagtgggatgccgtaaggatgccctttcccatataacagtggcggcagaatacgtagagccagtccctgcggctgggttttctcttgcgcgatggcggccagccattggccgcgtatccgttcaatgtctgtcgccttgaaggctggattgcgtaccagatcggcgaacaggtgcagtgatgggataagttgatcgttgagtgcgttcagcgaagcacgacaggaatccagatcgcaggaaatactgctgatggcacccagacgttgatgctgctgtgacacttcgactgagtccaacgaagtcgtgctttcgttcatcaacgttgcggtgaagtttgctgtccccggtttggcgccttggtcggctgcgtagccagcgtcaaatagcagcgtgatttgggttaccggaatcgtgtgccgttcggccaagatgacttcgatgccgtttttcagcttactgcgctgcaatgcagggaaatttagagaagggaactgtgtgacttccggtacaccagagcggcggtccacctgcgatgctgtcacgtggtaatggatttttggccctagcatggctgctggtttgcctggttcggcggagcgcgcagtgacctttgcatcctcggttgctggatcaatagtggggcctactggtaagacggttagcagataatctcccttgctgaaccatgttgccgctgcctgtttgacactgttcggcgtggcctgtgcagcacgttgtagatcgagcttgtaggcacctggatcattgagataaagctgtcccgcagcgaggatcgcggccttattaccgaccctctccaggccgcgcaccagatcggagcggtagttcatctgagcgcgttgcaattcatcatcacttgggccttcggccagaaacttttttaattcctcggcaatcgctgcttcaaccttggcaggatcgatcccaggtttcacatcggcgttgatttgcatttggctggccagcgcaaatggagaaataccggccgatatgctgtcagccagcttgtccttatagaccaagcgctgatacagacgggaacttttgttgccaccaagaatagttgtcgccaaatccagttgcaccacagtatcgcttcccagttccggggtgatccacgtgcgatacaaccgcggttgcgatacctgatcgtattgcacaccgcgcttttgtgccggtagcggcgtgatccaggggtgctggtgtgccaccggagggccggcggggatatcgccgaaatactttgccgctttgtcccgtgcctcggccaccgtgatgtctccggctaacaccaaggtcgcattggctgcaccataatgtgcttggaaccagctttttacatcggccagcgaagcggcctccagatcctccattgaaccaatcgtgctgtgctgatacgggtgattggctggaaagagattggacagaatattttgcgtcacccgtccgtagggcacgttttccctttggcgtttttcatttttgaccacgccacgctgcgtatccaattccttctggccgattgcgccaagcagatggcccatacggtctgattccatccaaagcgccatatccagcgcagtcgtcggtacagtctggaaataattggtacggtcaaaccacgtggtgccattcatctcggttgcaccgattttctcgaatggttgaaagtagctggccttgtgattttccgagccagagaacatcaaatgctcaaacaggtgtgcgaacccggttttcccggcaggctcgtctgccgaaccgatgtgataccacacgttgacggcaataacgggtgctttgtggtcctcatggacaattacggtcaacccattgggcagggtgaagcgctcgtaggcgatgtctggaatcgcttgttttggaatggccttgctggaaatcgtcagagtccccgatgtcgcgttgacctggggtgtgaaagtggcggttccgagaccgagaataccgatgatgaacagggacagcggacgtaacatgtataactccatgaataggatccattgccgagcgtaggaggtagcggcgtctttcgcaaatgttccttctatatgagtgaatgaagccatgacgcggtgggcactgctgacggcctattgatctgcgatgcagagtattgctgccgagtgattacccagtgactggatatgctgataagacgttgctggggtgtgatgcagctgtgtggacttcaggagaagccactgcacagccgtgttcccatacagtgattgcctgccgtatcgacatcaccatgatgaggacggatgcgcatcgcgatgccctttggtgatttcaatacgaggaagttcgtattgcgatccagccctgcatcatccgtctgcatccgcgtgattgatattgattgccacgccgcaaagatatcggcgtggttgcacaggcctaatgattgtttttgggagatgctgtcatgccatcgttaccactccggcggcggtctgccgccggaatggaaaatgcacttcaatagtttgaacagaacccgaattcagtcgtgcctttcggatcaagcgtcttattccagtccataccagaagcggtgagcgcgttacccttcactgaccaacgcgcgctccatagggtctggatattgcccctgatcgaaatcgtcaccgtccaggtagtgggactgttgctgatattagtcacttggatccgttcgcagtaaccagtatgccaatcgctgtccacgatggtattaacagaaatcttgctctttgtaggatcggagccaccaccaccggtaccactaccaccaccggagccactaccaccaccggagccactaccgccaccggagccaccaccaccaccggagccaccaccaccggagccaccaccaccaccggagccactaccaccaccggagccactaccaccaccggagccactaccaccaccggagccactaccaccaccggagccactaccaccaccggagccaccaccaccaccggagccactaccaccaccggagccactaccaccaccggagccactaccaccaccggagccactaccaccaccggagccactaccaccaccggagccactaccaccaccggagccactaccaccaccggagccactaccaccaccggagccaccaccaccaccggaaccatctttaccattccacagtttcttcagcagggtgagcttgtcttcgcgcacgtgattccagtcatcgcgaaacaggccaccggtatcgctgctgttcgcgtttatggaccaatagaaggtatccgtcacaccgatactgattagataatccaccagagcgttttgccaagcgacatcgcgtggatcaccttcaccgtacttaccaccgaactcaccaatcgccatcgcgtagccggctttcgcaaaatgtccgaagtgtttatcccagatcgctgccatgttgtttgggaaatcgggactattgaagtacggctgtacgtagacatctggcccgtagacgtgtggtatcaatagcaaatggtcggcagggactttcagtggcgtacagtccatcggttccaggttctcgccccagaaatgcccaatggtgctggagcagctgggattctctccaatcccctcgactccgatcagccattttggtgcggcctccaagatcgctgctgccgcatgctcgactgcggtgttccaatcagtttttggatctccggtgccccaagtggctctgccatgtggttcattctttacgtccaagccgatgacgccgggtacgttggcgtaacggtgtgcgacgaagcgtagatcatcaatccactgtttttcgctgtatgagtccgtgtaccacaattcagaaattgctgcgcagtccggcgtatggtgatccatcagcacatatattcctcggtcgctcagctctttgaccaccttgtccatgatttggagcgagctcaagccttgtaagtccggattgcggttgtaatcgatgctgctcggtgatgtgttgctgttcagactagctgggcagaacggtagacgcactgcgttcaatcccatgctctgtatctgtgtgatgaattctttccaattgcgtgtccacagcccgtgtaccacgtgatttgtggtctcaaaaccaaaccagctgccgccctttaattgtatttggttgcctttgtcatcaatgaccttcccatggctgatgctgtaactgaatactggtgccgcagataaggataggcacgtggccaacatgagtttgccgaagtgtttggaaaacgacattaagtatccttaatagggagggtcgttatcttctgcgcagttatcctccgtcgtcgatatggtggccgttagtgattcaaacgccgttagggttaaagcccaaaattcgattaaatcccggatgaatgcgattatttgttttttttatcactctatttccgaggtttgaatcacttaaattccggcggatatcgctcatggcaccccaagtctcgattgtgtgtcatggtccctaacggtgattgaggcgttctgctttacactcggaaagtgtttttgcgctagagaaggtgttgccaatgaggcggattgcagtggcggtgttggggtggtcggtgtctgggatgttgctcgcacagacgacgccggtgtttgatggcaaacgcatgtctgaggatgtcaaacaattggcatccgacgccttccagggccgcgcgccaggcagcgcaggggagcagaagaccatcgcttacttgagtgagcaatttgccgccgctgggttgcagcccgttggggatgtacaggccgatggcaagcgtctatggacacaggcggtaccgctgcggcgtacggaaatcctcggtcccccgcgagtgttgctcggtgctccgggtaagcaccgctctttgactcaggggcaggagattgcggtacgcgcacctttggatggagcgtcccaggttgccttgcaggcggtgccgctggtgtttgtcggctatggggtgaaggcgccggagcgccattgggacgatttcaaaggtgttgatttgaagggcaagattgcggtgatgctcatcaatgatcccgactttgaaaccggtcagggcgattttgacggcaagggcatgacgtattacggccgttggacctataagttcgaggaggcagcacgccaaggtgcgttgggtgcgttgattgtgcacgaaacggctccagcctcgtatggttgggcgaccgtggccagttccaataccaacagcatgtttgatgtggtccgcgcgcatccagaggcggtccatccgaagttagaagcctggattcagcacgatgtggctgtgcagttatttaaggatgctggccttgactttcatacattgaagatcaaagcccagtcacgtgacttcaaaccagtgctcttaaagggacagacgctgagcgctgattatcgggtgaagtccgaagtcatcacctcgcataacgtggccgcgcgattgcagggctgtgcgcatcctgatgagacggtgatttacagcgctcactgggaccacctcggtgttggcgcgcctgatgccaaaggggacaccattttcaacggtgctttggacaatgccagcggcactgcggcgttgttggagttggcgcggggttttgctcgggggccgcagccgcagcgttcggtgttgttcttggcagtcacggcagaggaaaaggggttacttggctcggaatactatgcgtccaatccgctgtatccgctggaaaagaccgtggccgtgatcaatatggacgtgatgaatccacaggggccgacccgcgattttgggatctatggcaccgccaaattggatttgctggacatgctgaagcaggtcgccgctggctggaagctgcgttataccctcgatccaacgccggaagcaggtcatttttttcgttccgatcatttttcttttgccaagcgcggtattcctgccatttcatactccgccggacaggatatggaggtggggggagtggctgcgggcaaggctgccttggaggactatacggttcggcggtatcaccaacagggggatgaatggcagccggattggacgtttgctggcgcggcgcgggatgtggcggtgctgtacgccttgggtcgtgtgttgacggatgagggtcggcactggccgaactgggctgaggattccgaattccgtgccctgcgtgatgccagtgccgcagcgcgcaaatgagtatggcggtgttcgatcccatgccgcgaggagaccttgggagcggatgcagggtggtgcttcatcttcttgagtccaacaggtgttctatgtctggagctgattcttggaggtgcgggttgcagggtgtgcgctgctgctaatgatgaatgggagtttcacagactcgtacagtgttttaaacagtggcggttgggtcgtgttgtgcggcgcacctggcgcatatcccatggacttccaacgtttgcatctgcggttgaaagcccagtgctctggcacaggcattcaattgggcaacgacatctttgtcttctaattccacggcgttatggcacttatcgcagatgaggaagggtgctgaatgcctgctgctgtttggatggtggcacgcaataaaggcgttgatcgattccagtttgtgaatgaaaccatgggtcatcagaaaatccagcgcacggtagaccgtgggtggagcattggcaccgacatccttaccctcgcgtacccattccagcagttcatatgccttcactggcttgccagcgtgagcaatcagctgcaatacgttggcgcggataggtgtcaggcgtagtccacgttcgctacatgcgcgctccactgcatggatgaactcaggtgcgtcgtgtacgtggtgatggggggcggtgcagccgtgatcgttactcatagagattccgtgggattcaagccgtagagatttttatcagtgccgcatcaatgcgtttcaaggcttcgttgcggccggtgaggtaaacggtataggcaatgtccgggctgacctgggtcccggtgatcgctacccgcagtggttgtgccactttgcccatgccgatctctagtgttgttgcagttgtgcgcaaggcggtgtccacgttgtccacagtccacgtgggaagtgcggctaacagggtacgtgcgtgcagtagggccgtgtcggcacctggtttgagatgcttggcgacggctatttcatcatagcgctgtaatgggcagtaccagatctctgctttctcggccatttctttcagtgtctggacgcgttcccgtagggccaggatcacgtccgtcggagcaggaccggcgctgacatcaataccgcgttgttccagatgccagaccaatggcggggcaagcgtcgccgggtcatcggtcttcagatagtgctggttcacccagccaagttttgccatgtcaaggcgcgctgctttggagttgacatcgttgatttggaacaggtcgatcagcgcttgccggttgaatagctcttggtcgccgtgtgaccagcccagccgtaccagatagttaatcagtgcatggggcaggtaaccggcatctctgtactgcatcacatcagccgcgccggtacgcttggacaacttggcgccttgttcgtccaggatcatcggtagatgcgcaaatgtgggtagtggtgcgcccagggcgtgatagaggttgatttgccgtggcgtattgttgatgtggtcgtcgccgcggatcacctcggtgatgttcatgtcccagtcgtccacaaccacggcgaagttgtaggttgggtaaccatcgggacgcaggatgaccatgtcgtccagttcgctgttggcgatctggatgcggcctttgatcaaatcgtcgaacgccacggtgccggtgtgcggatttttgaagcggataacccggttgggatcatcccggtatggcaggttggcttcacgtgcagcgccgttatagcgtggtttttcgccagtgcgcagagctgcttcacgcatggcgttcaatgtgtccttggagtcgtaagcgtagtacgccttgccttcggcaagcagacgcgcagccacctggttgtagcgttcgatgcgctgggtttggtagaccgggggggcgtcgtagtccagtcccagccagtccattgcatgcaggatggcatcaatcgcggcttgagtgctgcgttcgcggtcggtgtcttcgatgcgcagtaggaattgcccgttgcggcgccgtgcttccagccagcaatacagtgcggtgcgggcgcccccaatgtgcaggtaaccggtggggctgggggcaaagcgggtgcggcacgtcatggaaggctcaatggctgcaaatctgaaaatcgttgcaattctaacggagccgcttgtgctgcgtcctggcgtattgcgttttcagcattgcaacgctgtggaataagggaggcatgggtgcgatggtcatcacacctcaatgtgttctgaataggcacctggtggctgaaaaagccagcggccaataggtagatttggggagggcctgccgattcagccgccgcgttgtgcgtcagtatccaatgggtttgcgggctttgggtgctatggagttgtcaaagtggatggttgggtggtggtggccgtcgcgctgatggttccgcaggcgcgatgcatgatgtcgtttgcctgtgtggggttgggtggcgaggagaggaggggcattgcaagggatgcgggcatattttggtgtgttgcgcgcggtatcactgacacagggggtgtgagtgatggccgtttgcccgttttggcgggtgttggcactgcatggcggtgctcgcaggctgttgctgtcatcggaggtaggttggtgggatggacgcttggtgtttacctactgccagatgaaccgggacaatggcgttttgtttctataaaggaaatcgagatgtccatcgtccgcatgactgatctcgctttatccggtaaacgcgtactgattcgtcaggacttgaatgtaccgattgatcagggtcgtattacttccgagcagcgcattattgcttcgcttccgacgatccgtgtagcgctggagcgtggtgcggcggtcatggtgacttcgcatctgggccgtccgaaggagggcgtgtggagtgaggaggattcattggcacccgtggcgaagcgcttgtctcaattgttggggattgaggttccgttgcgtcgcgattgggtggatggcgtgcaggttgcgccagggcagttggtgttattggaaaactgccgaatgaatgtcggcgaagctgagaatgacgaggcgttggcaaggaagtatgcggcgttatgtgatgtgttcgtgatggatgcgtttggcactgcgcaccgtgcccaggcatcaacgcatggggtgatctgttgtgctgcgattgctgccggcggtccgttgttgatggctgagttggatgctttgagccggggattggagcatccggtgaagccgctgctggcgattgtggggggcagtaaggtatcgacgaaactggagttgctttccaatttggtgaataacgttgagcaattgattacggggggaggcattgccaatacgttccttgccgcagccggttactccatcggtaagtcactgtatgagggggatttgatcgagactgctcgggagattattactgcggcgaaagcgcgtggcgctgagattccgttacccacggatgtggttgttgccaagcagtttttgcctggagtcacggcaacggtgaagacggtggatgcaatcgttgcggatgatcttattttggacattggtccgcagacggcacggcactatgctgccttgattgaaacggcggcgacggtggtctggaatggtccagtgggtgtgtttgagttcgatgccttcagcaaggggaccgaggtgttagcgcgggccgttgctgcctcgtctgcgttttcgattgctggtggcggcgataccttggctgccattgataagtatggtgttgcggaccagatcagctacatctccacaggcggcggtgcttttctggagtttttggaaggtaagacgttgccggcggtggctgccttgcaggcgcgcagcggataagccgtgtgttgtgtccaatggcgtgttgatccattcaagtggatatggttaccgggtgactgcctcgttttatcgtgttgggtgatgaggtgccggaagcggtgtcacgctgtgttggagtgcttgttgatgtgggttgttgcggtgtttttgttggataggtggtgcattgttgatgagaggtgatgggagtgtggagggtgcccggtggtggagtagagggattgcatcctgggtgtgctgccggggagtccctgggcctgtcttgcgatgtgctgacgtgttgtcggatgaggtcggaatgatggttgtctgtctgctgcgacatgagaggtgcgtccatcctgaaaataaataacattctggaaaaaacagcctgtgttactttggctagcttctgtgaaagaggctttctttatgtctgaacgccagcgccgtaccaggattcttgccactctcgggccagcgacagatccgcccggtgtgcttgatgcgctgtttaaggcgggagttaatgtggtgaggctgaatttcagccatggcgatgcttcggatcaggccaggcgtgctgctgaagtgcgtgcggcggcggcgcatgtgggcgttgagattggcattcttgcggatctacccggtccgaagatccgtattggacgttttaccgaggggaaagtgcggcttgtggctgatgcgcgctttgatctgcttgccgatagcaatgcaccgctgggggatgcgactcaagttggggtcagttatctggggttgccgcaggatgtcgccgccggagacgtgttgttactggatgatggcctcatgcaattgcaggtggtgcaagtgcagggcgcacggattgtgacgacggtgcttaacgatggtgtgttgtcggaccgtaaggggttgaataagcaaggcggcggtttgtcgctgggtgcgctgacggatcgtgatcgcgaactgattggcatcgtttccaggatgggggtcgactttattgcagtttcgttttgtcgtcatgctgaagagatgcatgaggcgcgtcgcattgctcgggagtgcggctgtgatgctgcgctggtgtctaagatcgagcgtgctgaggctatcgtgaatcttgccgagattgttgcggcttcggatgtggtgatggttgcgcgtggtgatttaggtgtggagattggtgacgctcaattgccgggcttgcaaaaaaagatcatcaaagaagcgttgctacagaacaaggtggtgattactgccacgcagatgctgcaatcaatggttgaaagtccgatgccgactcgtgctgaggtgctggatgtggccaatgcggtgattgatgggaccgatgcggtgatgctgtcggctgaaacggcgacaggtgattatccagtcaaggcagtagaggcgatggcgcgtatctgtctgggagcggaacaccagtttgagtttgatactgattatgagatggcgcagcgtaatttgcagcgtgcagatcatgcgattgcaatggcaacgatgttcttatctgagcacatttgccttggtggtgtggttgcattgacggagtccggtacgacgccacggtttctctcgcggttccggtcgcacgtcccgatctatgcgtttacgcgtcacgaggatgtgcggcggcgcatggtgctgatgcgtggtgtatttccgatgcgttttgacagccgtggtttgacgccgcgtgaggcagccagggcgacaatccgtcttttggtggaatgtggttgtatgagtccgggggatcgtgtggtgttcacgagcggcgagcatatggaaacgcttggcgcaaccaatacgctgcgtttacttgaagtaggcgctgatgggggtgtcagtggtctgtgggaactctaagcatgcggatacaagtaggtttcactgtagtagcgcccgcgtgcgggcgtccttggtgaagagagaatttcgccgttgtggcttgatgtagcagtaggtgttgttttttcaacgtctcaggatgctttcgttggtgttgcaggtgtgattcgcggcagtgtctgagtggcggtcacggggggagatgggaacgtcgagcggtgctgtgcaggtgatgtgtgcatctgttgcttgtggctgtgatgtgcgccagggccgatgtgcttgctgtattgctaggcagtgtgcatgaggacgcgatggcggtaggtgcagatggcttggggatgacattggctgtgatggggtgtcccagagcatccactgggtgtgagctgttttcttctggggcactgggagagagggtctgtgtgcggtgtggtggagtgacgcccaagggagtgtgtggtgcgcagtggtgcttggagcggtgtgcaagcgggtattagttgccgttgtttgatgtgctctgatccggggtggcgtgaccgattgatgcttgaatcttggtctctattccttgccctgttgagttgcaagtggcgacgtagggtagggcgcggctgggatgtgaattaagcaggagtgattgcgtgtgtttatttatttgaaagggaatgttcttggggtgttcatcgctatacttccgctttctccgtagctgccataggaatccaatgagtattgaacagcttgcagaaaccgctcaagcaatggtcgcctcgggtaaggggatcattgcgattgatgagtccgccggcaccattgccaagcgtttttccagtgtcggtatcgaaaatattgaagagaatcgccgtgcttaccgggagttgctgctgacgacccctaaattgagtgattacatttctggggcgattctattcgacgagaccattcgtcaatcgacgaaggccggtgtcccgtttccgaagtacatggccgaccatggcatcatcccagggattaaagtggataagggcgcatatccgttagcagggtgtcctggtgagttggtcacggaggggttggatgggttgcgtgcacgactggaggagtattacaagcttggcgcacgttttgccaagtggcgtgctgttatcaacattggtgatgatattccgtcagggatgtgcatcgatgccaatgtacacgcgctagcgcgttatgcagcgttgtgtcaggagcagggcttggtgccgatggtggagccggaggtcattatggatggtaaccacgacatctcggctgcttatgaagtgaccgaggcgacgttgcgttccctgttcaatgcgctgtatgagcagaatgtggtgcttgaaggaaccattctgaaggcgtctatggtgatccctggtaccgactgtgaggagcaggccagtattgatgaagtggctgaatccacggtgatgtgtttgaaatcgacagtgcctgcgatcctgccgggtattgtgttcttatctggtggacagacggatgcgcagtccacggcacatttgaatgcgatgaatcaattggatcccttgccgtggccattgagcttctcttatggccgtgcgatgcagcaggcggcattgaagttgtggtcacaggatatgaagggcaacttcgccaaagcgcagcaggttgtgtacgagcgggctaaggaaaatggtctggccgctcttggtaagtggaaggggtgagctgctttgctcattgtggcgaaggcgctggctgtgatgctggtgccttctatgtttggcgcgtcaagtcatgcggtggcggctttgggaacgacgtgtagagaagcggtccgatgattcaggattcaggggacgctgcgccgcttgctgggaagccttgggaaatagggttactggtcggcgttgtgcagttgctgttgatgtgcgatgaatgcacgttgcgccgcttgacgtgctgcacggcgcgaggtgctaatagtgccttcagcggctaagagacgagctaatacgttcggcgtaccggcattgcgtgctagcaggtttcctagcgttgctgagttcagcgcgcggccaagtgttgcgcctccggcgatggtggctaatgtcggtatcaggccgcctgtggctatgccgccgccgccgagtaacccgccgtcgatgcctaaatctcgatacgcatcgttgactatttcttgcatacgtgcagccgcttggggagataacgctatgtttctatcgtcccaaatcgcgttataggtatcgttaaaacgctgtttctggctcgctaaccagcgatcatctaaccgttctgttgcatcgcctacgtggcgcgtcaatgccttgttccacgcgttctgctgattgcgtgcagccacgtctgcgccgctgaatgggatgtattttgcgacactagaggctgtacgtagcagcgtggattgtgcgatctgagaaatatgcagcggaatcccttcacgttgcgcaatgtcggtagcggcacgtaggatcggatcagctttacgcactaggcgacgcgctgcgccgtgcacaacgctgctcgcgcgacggcctaacacgccgcctaatgtgctgtagcctgcatgcgtgagccgattttctccggtgcatgtttcaccaagtgcgccataggctgccccttcggccgcagcaataccccccttaatggcaagcttagccacgtgaccgctccccgctcctccttcctatgcagattaaaagaactccatcgcattcactcagtggcgttcggaattagagagcaaaggcgcaccttacacttcggtccaacgcaatgatatgtgggtagagaaatgatccatgcaatcaccagggtggcactgttggctgccctgatgttagctgcatatgcttcaggtgtgccaatgaacacaacacatatcaatgatacaaaacgttccgtgtctggaaggccagcagcacaattaaaagatgttgcagctcaactgatcgccattggggaacaggatcaggttgaccgcaaacgcgtcatgtcgcctggatttgatgatgatgcattgtatacagccgatcttaagcgacagaaacagttagaacggctgatgcgagggcgcgggttattcaggctcaatgaggtaggcaaggacgctgtcaccgccgagtttctgatcatccagcactccagtccagcgttcatgaagcgcttcgagaaagaaatgggggaacttgccgccaggggtgatttccccaaggatgactatgcaacattcgtagaccgcctcttggtctatgaacacaaaccacagcgctacgggacacaggcaaacggagacttggagttgtacccgattgaagacgagcagttcgtagataagcggcgtgcgtcaatgggattgtccccattacaggtgctccttgataaacttgagaaagtcaaacagtctgtacgtaatggaaagggactcggacttgagaaatagcgaactggttacagcagtttcttaacaaaagcatccatattccaatgacacctcatcggcttggcagacgttttgtcgcggagctagttgaagtattcagcctcggcatcagtcacggcatttgctgcgccatgtgttttactcgcaaaatttccacggtgcgggtttctttgccgctgatcagcccgatgtgttgggcagtgcattgctgtgatgcagcgccacttgcggtgtgcaaacggatgtcttccgttgagatgcctatgttgtaacaacgccgccaatgggattggcggcatccgcccataggggccggatgttgacatggttaagtcggccttgctgagggcgctctgcatccatcccgggtgatgcgctggccagatgggccacgttgcgtttgatgtgctgtgtttggcagccagatcgcagtggggctttgcgtgtgtgtatcggcaagcgcaggagtgtgcactatgtgttgcaacgccatccgcgggggtgtggcagcggggatggtagccgctaatgatagcgatgggatgaatgcgtgaggtgtgctgtatctgccgctgtgaatgttcctaatcttctttagttttgtgcttcgtgtgactgtactgcacgggataggcttgcttgggtggcgatgattgctgtggagtctatgcgacgtgtccatctgttgtgcgatggaggacacgtcggccgtggagtgtgttgcgctgcgccagctcaggaacattctgctgtgttcagccgagactggctaaccacgcgtcgtctgaatgctcattgatgtcagcgaacagtggggtggagaagtaacgttcgccggtatctggcagcatggcgaggatcacggcacccggttgggcctgttgggcgatctgcagtgctgttgcgacggtggcaccgccggagatccccgagaaaacaccttcctccgcggccaggcgacgggccaccgtgattgcatcgtcgtcggtaacactgaggatgtggtgtggaacggaacgattcagtacctccggtacgaaatcgggtgtccatccttgaatcttgtggggttgccattccttcccttggagcagtgctgcgctggcgggttcgctggcggtgatcgtgatgtctggtcgcgcgattttcagcacttcaccaacaccagtaagcgtgccgccggtgccccatccgctgacgaagtggtcgaggcggcgtccggcaaagtctcgtaggatttccgcggcggtggtgttgcggtgataggccgggttggctgggttggaaaattgactggcgaggaaccagccgtgctgttcggcgagttctttggctttgcgtaccatgccgctaccgcgttcggcggctggggtgaggatgactttggcaccgtaagcgcgcatcagtttgcgccgctcgatcgaaaaggtttcgaccatggtggcgacaaacgtgtagccgcgggcagcggcgatcatggccagggcgacgccagtatttcccgaagtggcttcaacgatggtgtcgccgggtttcaataacccctgttgttcggcgtcgagaataatggccagtgccagacggtctttgaccgagccgcttggattgaatgattcaaccttgatgtacagatccacgtgtgccggagcaatacggttcagtttaaccacgggtgtgtggccaatcgtgtccaggatagtgttgtagatagtcatgaaggtctctgtggaagtaatcagggaggatgtacacacagatacgtgtgtctttgaatcagcttataggatgagtgcgggggggcatggggcagataatggtgcggtgccgaaccaatgcaggtgttcggccagcgtggtgacttcgccgaggatcagcagtgcgggggggcgcacggcatatgtctgtgcggtgtgcgcgagtgttttcagcgttccggtgagcacccgctgttgcgcgcgtgcgccattttcgatcagtgcaaaaggcgttgtttcggcgcgtccagcctcacacaggcgttgctggatggtgggtagccccgccacgcccatgtagaacgccagcgtttggcgttcttgtgctagtgcagcccagtccagggtgtctagcgaggattggcaatgggcggtgatcaggcatagcgattgggcatggtcgcggtgggtcaaggggataccggcataggcggcacaggccagggcggcagtgattccggggatgacctcataggggatgttgtgggtacgtaaaaattccagttcttcgccgccacgaccgaagacgaatggatcgccacctttcagccgtacgacacgctggccagcacgggcgtgttgcagcatcaggctgtgaatgtcttcttggcgcacactgtggcctgtcgcggatttgcctacttcgatctgctccgcatcgcgccgtgccacctgtaacacggtgtcgctgaccaagcggtcgtagaggatgatgtcggcttcattcaaggcgcgcagtgcatttaaggtcagtagcccggcgtcgccggcgccagcgcccaccagggtgacgctgccggaccccgtggggggagtctcggcgagtgctgcttccagcactgcttcggcctctgcgtggcgttgcttgcgtagcagtcgttggagtgggccggtgagttgggtttcaaagaaccggcggcgtgcttctatgtttggatagcgggcgcggatggtgtcgcggcgttgcgcgaacagtgtggtcagtcgtccccaactatcgtcaatgaggctttccagttgttgtcgcagatagcgtgccaccatcggtgcgccaccgccgctagaaatcgcgatccgcaacgggccgcgttcgaccacggccggcacctgcacgttggagagtgcaatgtcgtcgaccacgttgacgaatagccgttgcgcatgtgctgcgcgcgccgcggcgtggttcacctcgggttgatcggtggcggcgatgaccaaccaaatatcttcttgcagccagctgttttcaaacgtcccttgccgccaggtgatgcggccggtttcggcccagtgctgtaacgatgcggtcagagagggggcaccgataatcggcaaggcgcccactttgagtaatgcctctgtcttgcgttcggcaaccttaccgccgccgaccaccaggacggcgcggtcgtgtaggttggcgaataaggggaacagaacgttggcagtcacgatagtgagttgaggttggggatcatgaccgtagtgcctggttgatagtctcaggaaatgacttcaggcagttggaaaatagccgttagttattaagttcttcatggaagtgatctacagtcgtttttggttttgcgatatttcgcctgtcatgacgttgactcaacttcgctaccttgtggctattgccgatgccgatctcaatattacgcttgctgcggcacgtatacatgccacgcagccgggcctgtccaagcaattgaaaaagctggaggatgaactcggctttctgttgtttgtgcgccggggccgcagtttggagtcagtgacgcctgcgggggaggaggtgattgagcgggcgcgggcgatgttggttgaagtgaacaacatacgtacttatgccgccaatcagcgccgtgagcaccaagggcaattgacgttgagtaccacccacactcaggcgcgttttgtgctgccgcctgccgtggcgttgatcaagcaggcttatccggaggttactgtgcatttgcagcaggctgccgagagcgctgtgctggatgagttggatcagggaggggccgatattgcaatcgtgagtacggcgggcagcgcgccttcagcagggcttgcggtccctttgtatcggtggcggcgtttggtggttgtgccgtgtggtcatcctttggacacagtgggccgcactctggatttggcagcgctggcggagtatccgttggtcagttatgactcttcaatccggccaatgtcttcgctgcaacgtgctttcgccagtttagggttggagtcgcgcattgtgttgacggctctggatgctgatttgatcaagacctatgtgcgtgccggtgtgggtgtgggcattcttgcggagatggcggttaatgcggtcgataccgatttgcgtgcttggccggtcccggcgcccattcctgaatgtattgcttgggcggtgctgccacgtgatcgtgtcttgcgtgactacgtgttggagttggtgcatgcgcttgcgccgcagatcgacaagcgtgatttgcggcgtgtgctcaatggtcatcaggagcctgactggccgtcgcctcctagctggcaatcattgacacagaccattaccaattgagtgggttctcaagtggctgtgtgggggccatcgcatcgcccgtggcatctggtgatggtgtgggtttggaaagagtgctggatgtgctcccaggttcttggatgtaggtgtcatccccgtcgtgcggctgcgcatgtgcagcgtgtctttgtgttgcaggatgggctacagaagcatgtagtgtgctgggatcaattcactcccgaagcgcgacgccatagggcgttgacgagcggtggtaggcggtcgaccaggcccagtacacggccacgtagcagggtgaggtgaaatgcgtcgttggagaatacccggttaatggcatcgaacgtgtaggcggcgagggtgttatcgctgcggcgtgtccgtgcccagcgttgcaggcggtgcggtgtggcccagtcaacatggcgcgtgtgtgcctgttggatcagggtttgcaatgcggttacatcgcgcaagccgaggttgacgccctgtccggccagtgggtggacgacatgtgctgcgtcaccgagtgtcagtacccgtccggcgatgtagtcggtggccagttggcggcgcagtgggaatgcggtgcgtggtgagatgagctgtatgtgtcctaggcgcccaccgaaggcagtggtgagttcgcgtgcgaatgttgtttcgtccagtgccaggagacgttgcgcttcggcatcggggagcgtccagacgattgagctgcgctcatcagtaaatggtagcaatgccaatggtccgcttggtaggaagcattgccaggcggtggcttggtgtgggtgttcggttgcgacaaaggcgacaatgctgcgttgtgcatagtcatgtcggtgtactggcaggtgtgccaattgacgcaaggtggagtcggcgccgtcggcagcgatggccaggcgtgcttcgagtcggcgaccgtcctccaagcgtaaacgcactctgtcggtgtcttgctctagggcggtgatccttgccgggcaatgtagttgtacgccggcctccgcaagtgcggaccacaactggttgactaggagtgcgttctcgacgatccagccgagttgttcgcggcccaatgtggcagcgtcgaagtgcaattcgccccctccgccactgtcccagatccgcatgcgatggtatggctgggcgcgtgtcgcgcacacggtcggccatacgttgaaggtgcgcaggagtgcggcactgtccggggcaaatgcgtagacacgcagatccggagccgttgcttgccaacgcggcggttcgcatttttcaatcaaggcgacgtgtaaccctgttttcgccaatgccagggcgctgctggcaccgacgacgccgccgccagtgatgagtacatcgggtcggtgagttcggttcatacgctgttgcgacacaattgcggtacgtcgccacggaagcccatcgcgccgttgaccaggagtgcttgcagcccgctgatgtgggagacggcaagcaggccgagactgcgtagcggccgcagcagcggcaatccattgctggtgagttgtgccaagcccttagaaaacatgagtgtctgttcgcggtctgcacgccgtcgtgcggtataggcggtgagcagtgcggttgcgccggggtcggtgtgatcggcggcgatcatttcagccaaggtgagtgcatcgcgcaggcccaggttgaagccttgggctcctatggggtgcagtgtctgtgcggcgttgccgagcagtgccacgcgttcggcggtcagatcttgtgcgatcacttgcatcaatgggtaggcgctgcgtgcgctactggcaatgaagcgaccggcgcgccagcccatggcgtgttgcagccgtgtcagccaggcgctgtcatccagggcagcgactgtattggcctgggtacgggcgacgcaatgaatggcgccatagtgacggtcggcgcgaggcagcagggccgtggggccgtgttcggtgaaacgttcgtaggcggttccgtcgggtgcttgagtggtttgcacccgtgtgacgaaaagtgtttggaagtaatcgtgttgtgtggtgtcgatatgcagcagttcgcgcacggtgctatgtgtgccatcggcaccgacgatcaggcgtgcatgtaagagctgttcgccatcggcatgggcgatccgcacgccgcgcatgccatcggtcacgggtgtcacggcgatgcagcgtgctgggcggtagcgggtgagttgtttgagttcggtgaggcggtgttccaacgcttcgccaaaatcacgtgcaatgactacttggccgaaggcgtcacgtccgtaggtcgaggcatccaatcgcacgcggccgaagtcgccagtgcggctggcgtggatacgccggatggggccggtggcgtggcgtatccgtgtcatgacattgagggcgtctaaagcgtttactgtggctgcggcgaaacagagggtacgctcatcgaataccgtgggtagtccccccggtggtgtgacttcaaccaggccaacgttcatgccgatctggtccagggcaatcgcaaggctggcgccgactaaaccgccgccgacgatcaaaacatcatggagctgattcatgccaccatgataagccttcctctcttgggagtgggcttgggtgtgggttcatctgccaaagtgggcagcatcatgaggtgctgtctattgcataggaatgatggggtcgtaggtgataacagcggatgtctgcagaggatcaaggggattcgtgtgtcgttgatagtgatctcgtcaggctgggcggcaccgcgttaggacttcaaggttaaggtgacgccgctaagaggaaggcgttgtttgaatgcaccatgaactcggtgtgccgccacgttgctattgtggtggtgggttggtatcgctgtgaatagcgcagggacgccatgcagacgttgcgtgatccttgtatcgctgatgtttgtgggtgggacgctgtgccgtcggaggtagtgatgcatgtttgcggtgattgaactattgcgtcttactttattgtccatcagtgggggatggggcaagctaagcgacgttttattgatgatccgaccacgtgtatcgagttctacgtttattacccctgcctttaagtgttgcgatctctttgtcggcgttggcagacgaaaaaccgcctaattgggggttgtgtcccgcgacgttgccgttacagggttttgagcaggcccccggcatggataagcatgttgttcagagtcgcccccaattgccgaccaacatcgagggtgacacgctcactggtaccgcacgcaccccgctgtaccagggcaatgttttgatggcgcgtggcgatcagttcttgggtgccgatagtgtacggatggataccgagacggacagttatgttgctgaggggcatgtccgttatcaggattcttcaatcctggtcgttgccgatcgtgctgagggcaaccaggatacggatgttcataagatcagcaacattcaatatcagttgataggtcggcgtggcaatggtgttgctaagtctgtcgatatccacggtcaggttggacaaacgcatgaggccacctataccacctgcgatccatcgcaagcgatctggcgcctccgtgctcccgaaatcgatgtggataacgtggaaggtttcggcgttgcgcgtcatgcggtgtttgaggttggccaatggccggtgttgtatctgccttggtttaaatttcccatagatagccgccgccaaacgggattgctttacccgcagttagggtattccggtcgcaatggttttgactatgcgcagccgatctatctcaatctggcaccgaactatgacgccacgctgtatccgcgttacatgcagaagcgtggtttcatgatcgataccgaatttcgctatttatacgatgacggcaagtggcagacgcgtgccgcttttattcctaacgatcagttgcgcgataaagaccgtgggcgcttcagtttcaatggctaccacaatatcgataaccattggcaggcccgtgcttcattggcctgggtcagcgatacccgctatatggaggatttttccagccgccttgttgggatgtcatctctgtcgagcttgcaaagcaccgtcggtgtgtacggtacaggtgagacatggacggctggcctgatggctgaccgctggcaactcactgattacagcctggatgaaagtgcgttggcttataaccgtcagccgcgcttgtttttcaactgggataagccggtgttcgactttctggaattcggcctgtacagcgaggtggtgcgtttcaaacacgatgatgcgtatttggtggcactccagaatgatggcaattatctccgtaccggcgaggtgattcgctattacggcggcactcgcctggatgtgaaaccttatctgttgctaccgttcacgggtgcgtcttggtatgtcactccgacgtttgggtggcgctattcttcctattatttggatagcggcattgcagaacaattgaatgggaatcgcacgccggttcgcagcctgcccatcatctctttggactcgggggtgtacctggatcgtgacaccagtgttttcggcaggaactatctcaatacattggaaccgcggttttactatctgtatgtcccctaccgtaaccagagtgatctgccgctgttcgatactcgtgcgtttaccttcagttgggggcaactgtttcgcgacagccgctacaccggtcccgaccgtcaaaacgacgccaatcagctgactctagcggtcacgtcgcggtggctggatcaaaatactggcaaggaggatcttgcgctgagtgtcggccagatcctgtacttcaaggattcgcttgtcacgttgaacgatagtgaggaacgtatccaacagggtaagtcggtttgggttagtgatgtggcttacaacgtcaacgaccgttggacgctgaacgcaacgtaccagtggaatcctaacttccgccgcgatgatttagccagcatccgcgcccgttacctgatcggtagcgatggcatcatcaacctggcttatcgttatcggcgtaataccttggatgggacaacccagctcaaacagacggatttttctttcttgtatccaatcaatccccgttggagtgccattggtcgttactattattcgttgttggataagaagccgttggaaatcatcagtggtctccagtgggatagttgttgcttagccgtacgcaccgtgctccgtcgttacatgcgtgaccggacagggaatatggataactctattcagctggagtttgtgtttaaggggttgagctcagtggggcaggacacagatcgggtcctacgccgtgctattctcggttactatcgcgatgacctttacttggttccgcctagtaatacgacgaccgatccagacgcttacgatccaaataagattccatgaccagatatttttctattgttctctctttgctgttggctgtgtcctgcgtgtttttgccggtggcgtcagcacgacagcagcaacatcaaccgctggatcgcattgttgctgtggttgatgacaatgtggtcttgaaaagcgagcttgatcgcgcgattcacaatgtcaaatcacagtatgttggccatgaaggccagttaccgccggatgaagtgttgcagcgccaagtattagaacgcttgattttgatcaagctgcaagttgcgcgcgcgcagaccaatggcatccgcgtcagcgacgatgagctgaatcaggccatttccagcattgctgagaataataagaccagtgttgatggtctccgccaaaaattagttgcagaagggatttctttccccgaattccgccagtcagtgcgtgatgagattaccgtgcatcatttgcgccaaggctttgcgcagagccgtattgtggtcagtgaaggtgaagtggataccgcactcgcgcaggccagcagcggtgcccagtatcatctacagcacatcttggttgccgtgcctgacggggcaacctcccaacagattgcgattgcccagaaaaaaatcgatggcattaaaagtgtgattgataagggggagcttgccttttccgctgccgcagtacgttattccgatagtcccaacgcccttgaaagtggtgatttgggctggcgtagccttgacgagattcccgaagcatttgcgcagatggttcaaaccatgaagcctggccagatcgttgggccgctccgtggcaccagcggttttcaactgctgaagctcgtagaagtccgcgatagtgctgctgcggcggcgggtccgcggcagatggcgacggaataccacgcccgccacattctggtgcgtattactgagaaacagaaagaagcggaagcgaaggccaaaatcgacaccctgcgtgctcgtatcgctggtggtgcggatttccagaccgttgctcgggagtcctcagaggacgctaacaacagtaaccagggtggggatcttggttggtttccgtccgatgcgtttggagctgactttggtaaccatgtcaaagcgcttgctgacggcaacgtctccgaacctttccgtagcgctgccggatggcatatcgtgcagcgtctgggcacccgccagacagatgtcaccagggagaaccagcgtgcccagattcgcgacacgattggccaacgcaagttagaagaatcttatgagcgttttttgcgggaactccgtagtgaagcgtatgtgagtcttcagattgaggagccagctgacgatcaccagactcccagcgcggcggtgatcccggcaacaggggccgtattgccgtccgcaacgaagcactgatttatgttgcaccccgcgcttgctttggttcctggcgaaccggctggcgttggccctgaattgtgcgtgcggttggtacaacaaccgcgtcaggattgccgacttgttgccttcgccgatccagccaccttacaggctgctgccgctgcactagatttgccgctgcgtttgcttccgcccgaagcacttgctgagcgtcctggtgatctgcctatacaggcccagtgccacgttcatccgacgcgttttggtcacccagaccctgccaatgctcctgcggtgattgctgcactctgtgaggcggcaagcgactgcgtacatggagcgctgcatggcatcgtcactggcccggtacacaaggccgtgatcaatcagagtggcatccattacaccggcacgacagaattgctggctgcgcaggcagagtgcgacgtagtcatgatgttggctaatccgcatctgcgtgtggccctggtcaccacccatctgccgttgcgtgatgtgccggacgtgatcaccgctgcgctattggagcggtgcttacggattgtcaataccgcgatgtgtggtgactttggcatcgcaacccctcgcattgccgtgcttggattaaatccgcatgcgggtgagggtggttatcttggtcgcgaggaactggatgttgtcatccccgtgttgcagcgtttgcgtgccgaaggcatggttttgctggggccactgtctgcggatacggcgttcttgccaaccaagttgattggctatgatgcagtggtggcgatgtatcacgaccaagggttgccagtactcaaacacagcggatttgaacaggcggtcaatatcaccttgggccttccctatccccgtgtggccgtggaccacggcaccgcccttgaccttgctggccgtggcgttgctgatccttctagtctctttgcagccactgcgctatgtgcccggctggcggtgtcgcgcgccttgctgtccgtacgttcttgatgaccgcgcattagtgattccaaacaattgattccaaacaagagcctcgtatcgggcagctgtcgtgtttcccggtgatacaccctcaaccggctgacagcagcagcgtgaacatgccgtcgccgatgccatcccgtgtgcgatgccttgcattgctagacattcccatcgagtggatgctggctccctgctgttgttactggtggctcccggcaagaggtgcaaagcggcatcgttaacgcatagctggagactgctgcctgtcgcgtatccacggacatactttcccttgccttcggtattgccgagcaagccttgcctgtcatgagagcgtgcaagcagacaagacccatgcccagcagcgtctctgctgctgcagaacattacttccccgtccttggagtgatccagcgttgctgctgcacaccgcgtacctgtgctgctgccgtatcactcacatcgaagacgagcaccgtgttctccccttgacgctgccacgcccccgggaagtaaagcgcccgctgcgggccgatgtcccagtagcggccaagcaggtgaccattggcccaagtcactcccttgctgaaagccgccatatccaaaaatgtgtctccaggcgtgcggatcaacaacgtgccacgatgaaaggcaggtccttgcatcggtgcggttgtccaaccgtggatcgcttcgggcgtctgcaacggcagcagaaacgtttcccaattgttgacgcgttcatgattgagcatcaccggatcgatcagcccggcgcgaccgtcagccaggtgcggaccgtagttaacccgtccactgttttctaccaagacatccagacggtgagcaccggagggaatgtcgacctctacggagacctgctgccgacgccgttccgcccgacccacgaagagacgatcaacgtagacacgggcgtcatcccgcacctcacccagatacagcgtgcccttccgtggcccgtggagcgtggtgcggtacagaatgtaaccgtaggcctgcccatagcgctccatcggctgcggatctgctgtggtggcgaccgctgcaggcaggttgtcccagagcgaagcggatgcgcgcaatggcgtgttcggcagatcgataaaacgggttgctgctggcaatggcggcggctggagaccggtcacgcgggtgatgacatcgcggaacagcacgaacttcggcatcggccgtccggcttcgtccaacgccgcatcgtaatcgtagcttgtggtttgagggctgtaatggtcactgggaccaccttggaagttggcaccattcatgaaaccaaaactggtgccgccaacaaacatatacagattgatcgaatggccttgccgcaacatccattcgatctcatcagcctgttgctttgcatcagtctgcgcgtgcggcttgccccactggtcgaaccaccccgcccaatattcgcccaccaactgcggctgcccaggatggaatgtggcgagcttgtcgagcgcctgtttcgcctcacccggtgcaacattcaccgccgccagcacgtccggcagcgtgccattgccaagcatctgcgccccgtcggcggtaaacaacaacgcgcctcccaaaccggccttgatgaatagcgcgcggacagcctgtagatagccatgatcatccccataagagccgtactcattttcaacctgcaccgcaatgatgggaccgccattgccattgagcagcggcctgacctgtgtgccgagtgcctccagatagcgctgactagcatcaagaaaacgtggatcctgactgcgcacccgtagcgtcggatcggcgaacagccacgctgggaacccccctgcctcccattctgcacacacatacggcccgggacgcagaatcacgttcagaccttgcgacgctgcttcacgcacaaaagcactaatgtcgttattccctgtgaagtcgaattgaccttcacggagttcaaccaggttccagaaaacataggtttccaccgtgttcaaccccattgctcgggctttttgcaaacggtccttccagtacgcccgtgggatgcgttggaagtggatggcacccgagatcaactgatacggcctcccatcacggatgaattgcgttccccgagttgaaaaagcaggccaaggcgcagcgttaactccaatgggcagcgcgattacgaatatcagtggcaacgtgagcaggtgacgcagcatgggtatgtctcaaagagggaaaacgcggcgtgatccgatccagcaccgccagtcggatgaagcgctgccgtcaatggaaaaatcagaagactgggcatccttgctccatccgcagcgcatcatccgcccagagtcgccgccccgcgttttgtactgactgctgcatccatgaacgcgccacatgccacatggatacggaaataagcatcgctgttcctacaccgctcatgcgtgttttggaactggctgcaatgccgtgaacgacggcggcagatcctgcggatgggtgccgaaagcgagatttggttgcgcacccatctcaaattccagcgtcccccctcgtgccaattcggtgtggcgcagccaagcacgcgtcatcggactgccgttccaacgcagtgcttgcacatagacgttggacgcactggtgtgacgcgccaagatgcgcagcttacggccccggcccacgtccaactccgcgtatgggaacaacgggctgccgatcacatagataccgctgaccggatccactgcatacatccccagcgcactgagcacaaaccaagcactcatctgcccgcaatcctcatttccggacagaccatcgcgcccatcatggtattgctcccggagtaggcggcgcaccatcacttgcgttttgtacgcttgtcccgcgtacacgtacagataggcgatatggtggcttggctcgttaccgtgggcgtactgacccaccatcccatccatatccggtggcgcccctggcggcaattccgagggtgcggaaaacagagcgtcgagtttggcggcaaagtgatcagcaccgccgaacagcgccatataaccgtacacatcgtgctgattgagaaacgttgcctgccaagcattgcactccgtgaaatcgtgccactgcttcaggtgccccaacgcgcgtggatcaaacggcgttgcccaggcaccattttccagacgcggttgcataaagccactgtcgcggttgaacacatggcgatactggcgggagcgtgcgcgtagcacccgcgcctcactgtgcgcccctgcggcggtggccaaatgcgcacacgcccaatcgtcataggcatactccagcgtccggctgaccgattcatccaccttgtcactggggatatagccgagcttgcggtagtaccgcagaccgtgggcgtgatcctgcatggcgcgcttgcggtagtgcggccaagccgccgcatagtcgatgccagtgaatccttttgtgtagccctcggcgagtgctaccgcggagtgatagccgatcatgcagccggtctccacaccctgtaacggccagatcccgacaccgtccggacactcagccgcgccacggatcagacattgcaacagatcagggacccgatcggactgcaccagcgtcagcagcggatgcagcgcgcggtaggtgtcccataaagagtaggtactgtaattgtggtagccggccggtagcgcatgcacctggagatccataccgcggtagcgcccatcaacatcactgaacaacgtgggcgccagcagactgtggtacagactggtgtaaaaaatccgacgttgcgccggattgtcggttgcgatccgtgcgcgcgctagagcgttctcccaggccgccacggcctctgcatgcacacgggcgaaatcgaaatccggcaattcggcgtcgagattggcaagcgcatttgcggcgctgaccgcggataggccgactttgaccagcaacggcgcctcgcccgcatcggggaagtgcaacgccgctttcagacagacgccctgaacctggcgcgtgtccgcagtcagcggcgcatcgttgctatacaactgtgcacgtgcaaacgggcgtgacaaccgcatggcgaagaagagatagcggcccttggcccactgatacacacggcggccgcccagcagcgtacatggatcgacgatcgataactcgacatcgcgcaaccgtggtggggtgcttgggttgtcctgcatcgcgtggctcaagtccaacagcaggtgaccggcttgatgttgagggaaatggtaacgatgcaggcccgtccgtgcggtggtggtcagctcggccagaatggccgtgtccttcaggcgcacctggtaataacccggcgaggcgacttcctcggcgtgatcgtagcgttgccggtagccggtctcaggagcattgagcggcccgggtgtcagcttcacgtccccagccccaggcatgagcaaaatgtccaacatgtcgccaatgcccgtgccggagaggtgagtgtgcgagaaccccatgatcgagccgttggaggcgtgatagccggagcaagcatcccagaccgcgttatcggtgtccgggctgagttgcaccatgccaaaaggcagcgtagcccctgggaaggtgtgcccatgaccgctgctgccgataaacacatccacgtaacgcgtcagatccgcctgtgcctgtgtgtcaatgggcagtgcccaggtattggcgcgtggatgtgccagagcacgtagctggcccgtgctgccaatcagcgtcaggctgatcgcaccccgcaaaaaagtgcgtcgtgttgccatcgtaggtctcctccgccgtgtatggagtgggaaggtgtttgaagaggccgggacaactcatccatgcagcagcgcagcggaacggttcactccgagcagatgcggcttgcgttgtgccagatcgacgatcaattcaccgaacaaactattcgcccaggcgaaccaactgcgggtaaacgtgcttgggtcgtcctgatgaaatgcttcgtgcataaagccggtcccggcatgggtagtcttcagccaatgcaaacagtgttggatctgggtgtcgtcgtgactactcagcgcgtaatggatgagcgacatcggccagatggtgtgacgccccgtgtgtgggctacccaccccaacagcggcgcgtccctggcagaaatacggattccgcgcgctccaggccaagtcgcgggtgcgtaagaacaccggatcggtcgacgtgcagcagcccagataagccaagctgagcaggctcggagcattggcgtcatccataaataattggttgccatagccatccacttcgtaggcccagaaggggtggttgtccgcatcgtgcatcagtccaaattgctgtgtcgcttgcgcgatctcgtgggctaggctgcggcactggcttgcaaatgcagcatcatggtgaatcgcctcgctcattgcagcgagctggcgcagcgtgatgacggcgaacagattttctggcaccgacaaggggtaggtgcaggcatcgtcggagggacggaacatcgagtgcagcatcccgttgggtcgcgtcggcgcgccgtagccctccagcatcaatgtttcagtggcccgcagtgctggacgctggaaggtatacgggccgggagtctgcaagcgttgttgttcgccgaaggtgcgcagcacgatgtgcatggcctgccgccagtcttcgtcaaacggtgcgatatcgtcactggcgcgccaataggcatgcgctaagcggatggggtaacacagggaatcgatttcccatttacgctccccaatccctggttgcatctgcgtcacgtcgttgacggaccatttcaaagggtggctaaccccatcgggcagaaaggcattggcgtaagggtccaaacggatgcatgccgcgtggcgttggatcaggccgtggaataaacggcgcagcgcggggtcatggcgggccaaggggacataggcctgcacttgtgccgcagaatcacgcagccagagtgcttggatatcgccggtgatgatgaaggtgtcgggcttgccgttgcgggtgccggtgctgacggtggtgtccagcgtgttcggatagcagttttcaaacagccaagccaattcagggtcagcaatcttggctttgatgtgtatcaactgttgttccaccgcagcactgacaaagcggcgctgtgcttggggtgggcggcggctgatgaagtcggaggatgatgcagggggcttgcctgcgcgcggtgcgctctgtgccagccctatgggattgagcagcgcaatccccgcggtatgagtgatgaagcgcagcagggtgcggcgactcaggcgctgctggagggggaagggaggcaatggtgatgtcatggggtgatgtgcagtgcacaccgacataccgatggtagggggctatgtggtgggtatcccttgcctgctgtcttgtacggcggtgatggagggccagtcattgtgcaggcgctggtgtggctgggtccgctaactgggggtggaggcatccatgaggtgctgttcatagacagtgttgatggcggtgttgccattggggcagtggtgttgcgtggtgacacgttgcgtgaaatatcactctatccatctgtgcaatgcattggtgatgcgttgggtggctgttgatgctggtgtgcgtggcggtgagtgttgctggagtcatcttcgcggattcttcacacgaggggatgtgctgtcgggcacagtacacaccaaattatttcgggagcagggcacgaccgatgattgagaatgcggcggttccgccgggtgcgccggtgttgggttggccaccgcctacaaagaggtggtagtgaccggcttcgacgctgcgttgcccggtctgctgcacgctgctgagttgccgtgtgtctagtgtgaaggttagcaggcgggattcgccagggcgcaatgtcactcttttgaagccgaccaggttgcgcagtggtgcctgtggggagtgcgggggttctagatagagttgcacgacttcatcaccggcccgggtgccggtattgcggacgtgggcagtgacggtcaaggtgtcgcccgctttcagggttgcggtggagagctgcggtgcttcgtaggtgaattgggtatagctcaggccgtagccaaatggatagagcggttggcctttgaagtagcgataggtgcgccccgtcatgtcgtagctgatgtaggggggcaggtcctgggtcgagcggtagaaggtcacgggcagacggccgccgggattgacgtcaccggccagggcttgtgcgatcgcggtgcctccggattgtccgggataccatgcggcgaggatggcgttggcatgatgttgtgcccaattcagtgcaacggcgctgccgctcatgaggacgacgatcaggggtttgcctgtggtcttcacatgttgcagcagggtttcttgggtggcgggcaggtcaatcgtggtgcggtcgccgccgctgaacccgggggtgtcgatgtgcaattcttcgccttccacttccggggagaggccgacgaaggcgacgatggcatcggcatgtgcgaccgcacgttcggcttcagccagttgtggcgctgccggggctagccattccaaacgcacgccttggtcttcgccacggtgttccatgtccaggcggatgtggtgtgggcgggtatcggtaaagtgaagggttgcttcaaggtgtgtgttatctgtctgctggggggccgtggtcgcttgggccgctgtggcgttgtcggggatgatttggcgatcgtcgatggacaggcgtaccgggtcgtggccgttgcagtcgaagcagcgcgcgacatgcacggcgaaggtgtaggtgccggggccgggcgggaggagttcgccggtccagcgcaccgcgtagcggtgggggttcatgcctggtgctggggcgacgtgatcccagttgaaggcgatgatgcgatcttgccgcactaggtgcggtgggccggcaaagtcaatcgtgtcgaagtattcccctttcaggccggggtggccgtggttgcgcagtgcggtttccgggatggtgcctggaacgccgggagccagggaggcgccctgtgcatagtggattttggcggcgccgaaacgggtccgtaggccggtcagtggggtcactggggtcgaggaggtgccttggtaattggcttccagggcggtgagtgagtcggcgtccgggccgaggacggctaatgtggtcccgggggttaacgggagtgtgttgccggagtttttcaagaggacgagtgactgaacggccgcttggagtgcaagggcgcggtgcgctggggtatcaatgtgtttgatgccgatggtggcataggggtcgtgctcgcgtggttgcagcgtacccaggcgctggcgtgcagcgaagaggcggatgagtgcctggtccagtagcgcttcatcaatgtcgccgcgcgcgatggcttggttgaggtcgcgataggtgttgccgcagttgaggtcgttgccgctcttgagtgcggcggctgaggcgctggcgttgtcttgacggaagaaatggaatcgggtcatgtcgtcgattgcgtcgcagtcagagaccacaaagccgttgaagccccagtcgttgcgcagacgtgtgttgagtagccagtcggaggcacacgcgggtgtgccatgtagggcgttgtaggcacacatcactgagccagcatggccgtcgacaatcgcggcgcggaatgcgggggtgtaggtcgcttctaggtcgtaggcggagacatccacgtcaaagctgtggcgtcccggttctgggccactgtgtacggcgaagtgtttgggggtggcgatggtccgtgggtggtcggggatgttcccttggaggccacggatgaagctcactgcaagttggccagtgaggtaggggtcttcaccgtaggtttccatgccgcggccccaacgtgggtcacggaaaatgttgatgttaggggaccagagggtgagtcctgcatagcgggggtggtctttgccggggccgccggcgaggttgaatttggcgcgggcttcggtggaggtgacggtgccgacgtgttgcagtaggtcggtgttccagcttgcggccaggccaatggcttggggaaagacggtggcgtagccgttgcgggcgatgccgtgcagtccttcgctccaccagtcgtaggcggggatgcccaggcgtgggatggccggggcggcgttcattgtttgcgtaattttctcttggagggtcatttttgccactagggcggcggcgtgttgttcgggggtgagtgccgcagcggtgggtgttgtggcgagtaacagggtgagggtgcttgccagtatggggggggctgcaatgggcaatggcatcgcattattcctgggcgtgggagacgtgacgggggctggttggagaggcggggagcaataaaaggagcaataaagggtgtggtgtcactgggctgcttcgggttcgggtggggcaccggccagggttgcggccaggtcacggatgtgcagggcgtgttggagttgtgtcagtggggcggaactgcggatatggatggtcaggggttctccggggaggaggtcgaaggcgttatcagaaagttgtgcatcaatatcgccaaacgatagccagacgttgcgtgccagggtcgggctggtcagggtgaggagaaacatgccgtgctctgtcttccaggtgctgtggatgtagctctgggggagttttaggtgtttggcggcgtcgaaaaggagggtttgacgtgataggagggtgttgccatccaggagttcaaacacggcaatagtgtgtgtggggtcggtgtggccgaggagttgtgtgtcgctgtagtgtgcgacctggaggctgctcaaggggggcagtgtggtgtgttggtcgtcggtgtggtgtggtgtgccgtccatgtccaggacgcgcaggcgccaatggacgtgcaggggtgtggtgcggtcggaaacgagggagacggtggtcatgccgtctttacggagtgcggcgatcatgaggggggcgtagaagcggcgtgtgtagtagtgcagggctttccaacgtcctgcgtaatcaatgctggaccaggaggcgccgggccagacatcgttaagttgccagtagagggatcccatggtctgtggccgtgcggcacgcaggtgttgggcggcaatggcaatgccttcggcctgcatcagttgactcaggtagatgaagctttcgaaatctttgggttcgccgaatgcgcgacggatgtacagcagaaggcgttggttgccgttgccgttgtcaaatttttggtgggcacgcatcacttgggatgtgagggagaggtcttctgggcgggcgaatgtgcggatggtgcgtatatccggaaaggattgcaggccatattcggacatgaagcgcggggtgatattgaggtattcggtgactgggagtgcggggttgccccagactttccagtagtgcatgtcgccgtcgttggtttgctctgctgggccgtcgaggtcggtgccgggggaggtggcccagtatggggtgccgggggagtagaggtggacggcttcgcgcaggacgctgccgaacagggtggtcatgccgcgctctatgttgctgcgttcttcagggggcagggattgtttgaaggtgatgcggtcgccccaatgttcccagccggtctgtacttcgttgttgccgcaccacaggacgatgctggggtggtcgcggagtcgggtgagttgttcgatggcttcttggcggacgttttcgcggaagtccacgtcgtcgggggggatggcgccgccgaacatgaagtcttgccaaatcatgatgcccagtgcgtcggccagggcgtagaagtgttcgtcttgatagtggccgccgccccagacgcggagcatgttcatattggctgcgcgggcgtcttggagggtgcggcggatggtcgcttcggtcacgcggctggggatgctgtcgaatgggatgaggttggcgcctttggcgaagatcggaatgccgttgacgacgagggccatgcttttgccccattggtccggttcgcgacgcagggtgatggtgcgtaggccggtgatgcgttcgatgtgttggatggtgccggcggcatcgcggacggtggctttaaaggtatagcggtctggggcgccgtagccgacggggaaccagcgtcgcggttgggcaatccgcacggggaggtggatgtggttggggccggtgtcgagggtggggtgttggtggtattgggcgattgggcggccgtcggggtcaatgacttgcagggtgatgtgagcggggccgcgatgcgttgcatccagggtgagttgtgcttctaggtgtgcggtatcggcgtcgacgcgttgttgggcgatgtgcaggtcattgatgcgggtggtgtcccaggtgtccagggtgacgtttttccagaggccggtggtgacgatgcgcggtccccagtcccagccgaattggtagggtgctttgcgtacgtaggtggcgctgtggcgtgcggttggttcgtcgtggaaggcggagtcgtaggcgccggggagggcatagggttgttgtgtgagccagggttgaatctttttgatgggtgagtagagggttatttccaggatattttcaccgcgtttgagcagtggttttgcgtccacgcgccagcgccggaacatgttgttgggatgaagcaggggggtgccgttgagggtgacggtggcgagggtgtcgaggccgttgaagaggagttcgatatgttggcgggtcagtgtggcggtgtcgatgtggaaatgggtttggtattgccagtcgttgaggccgatccattgaatctgtgcttcttggtcacggtagaaagggtcggggacgatgccagcggcgatgaggtcggtttgtacggtgccggggacgtgtgcgggcagccaggtggttgtttttaaggggagggtgggtgttgtgggttggtcaggggcgaggcggaggtgccagttgctgagggggtggctgctgggtggggcggccgaggcagtgaggagggtgccaaaggcgagcagggggaaggcggccaggcggaggcagatgtgtcggtggcgtggcatagggggtgtggggttcagtgtgtggggggcggaggtgatgcgggggtgtcgtggatcagttggacgcgaccaatggcatacagtgggccgtggatgggggcggtgatgcgtaggcacaggtcgtggacgccgatggttggtggtaatggggcgtcgagggtgaatggttcgccgatggtgtctccgggcgggagggggatcacggccagtggttttttgttgcagtcggtgcggatttccagttcgccgtgtgcggtgtgtttgggatattgaatgactttggattggtcgtgggccagaccgtagttgcgtgctaggcgtgcggcgtcgatgtggatggcgtgtatgttgttgaggcgtatttgggggacgatccagcaggcgtggaataggtcgacgttgtacacgggggtgttggggtcgggcatgtctggtaggagggggacgcgtaatcccagtggtcctttgtcggagcagttgcgtaattcttgggtgtccacactcagcagtgtgttgtggtcgaaggtgcggctgcgggtggcggccagggggcggccgtcttcggtgaatacggctgctttgacggtggtggggagggtgatgggaaatggggcagtgtagcggggggaatgtagggtcggttcgttgccgttggtggtgtagtgaatgtgaccggtgttggtttggttgctgagtgtgacggtagggggtttgccagcaagggcgtaggctgaactgtgttgcagcatgatgtcggcggcgaatgcgccgtcgctgtagtcaatgcgcagggcttggtagcggtgtagttgtggggggaggcgtttgaggaagttgtcccagttgcgtacggtcatgggggaccaggcaacttcggcgacggcggcgaggcgtgggaatagggcgtgatcaatgtgccagcgtgaggggatgtattcgctccaaagggcgctttgtaggcccaggatgtggatggcttggtcgggggtcagttctttggggatggggtccagtgcgtagacgcgggagaggggcagggtggcgaggcggccgtttggttcgtcgctgcgttcggtttgcaggttgtctaggtacatccagccggcgggagcgagtacgacgtcgtgtccttgttgtgcggcggtgatggcgccgtcgacgccgcgccaggacatcactgcggcgttgtctgccaggccgctttggatgatttcatcccagccgatcaggcgtcggccatgtgttgtcaggtattgggaaagttgtgtgttgaaccagccttgcatggcatgtgtgtctttcactcccagtcggcgcatttgggcgcggatggtgtgtgaggcttcccattgatctttaacggcttcgtcgccgccgatgtggatgtacggggaggggaatagggtgagtacttcgtcgagtacattgccgatgaagtccaggctgggtgttgcggtgtcgaagaggtaggggttgacgccccagtcgacgctgacgggtggggtggtgccggtgactccgatgatgtcggggtaggctgccacggcggcttgtgcatgaccgggcatgtcgatttcagggaggatggtgatctgtcgttcggtggcgtaggccacgagttcgcggatttgatcttgggtatagaagccgccgtagcgttctggggtgccgtggcgtccggcgcccggtgggatgcgttcggcgccgattgtagtgagttttgggtagcgtttgatttcgatacgccagccttggtcgtcggtgaggtgcaggtgcaggacgttgagtttgtgttgtgccatggcgtcaatcacgtgtttgacggtgtccacgtcgtggaagtggcgggcgacgtccaggagttggccgcgccagctgaagcgtggccagtcgtgaatggtgacggtagggatttcggttgggccttggttgctgtcggcagtcagtagttgccatgcagtgatcgtgccgtagaacagtcctgctccgtctcgtgccgtgatatggatgccttggttggggagggcttgcagggtgtagccttctgtctgagtgacgggtgattgtgggtcgcgttgtaggcggatgctgtctggtgtgggggtggtttcggtgtggatgtgtaatgtcaggttgcgggtgtgctgtagcagtgtggctaggtaggtggcgctgtgttgtgcgtcggtatcgttgggggggatggagatcagggtgtcggtgccaatgtggatgtgtccttgaccgcgttgtatttgaacgggtgcagggatcagtggcagtggtgggccgggagcagttctcgggggtaatgggtgttgtgattttttatggtgtgatgcagtggtgtcgaagctagtggttgacagtgcggcaatgcacagggtgagcaatgcccgcagtaatgggagtgcctgcgttgggcgggcgggggtggggggcatgcggttgcttccttgggggggggcgtgtgccgcgttgtgtggcggcaacacgctaaggggctgtgtgtgtttagtggatggcgaggggtagttcatcccacattttggggtcttcggcacccagtacccagcagctgaaaccttccagtccgttctgcttcaccaggtcatagcgtgcgcggaagctgtgtgcgtcggggcggaagacccattcgcgcatgttgtcgcggtaaaagtagaaccatgattcttgttctataggatcccattgcacgttggctttttgtgtgatggctaatgggaaggattcgtcggcgtcgatgttggtgccggaaatgttggaggcttcggtgccgtcttttctgaccgggttaccggtgaaccagcggtagccataggaggggattcccagggacagtttttctttcggtacctgggtcagtgcgtattccaagtgctttttggtccagggcatgccggcaacggggccgggggtggtccaacgggtgtgttggtcgtaggtcatcaggctgatgaggtcggcggcttgaccgagtgctttcaggttgtagacaccgcgccagtatttccacatccatttggagaaggggcctccttcttctgggtggccaggtgcattagggacgacggcgattgatagggtcatgcccgctttatgtagagcttcggcggtctgtttgaccatcaaggtataggcgtcacggtcggtttgggcgatgttttcaaagtcgaattggaagcctttgtagccgcgtgctttgctttcctttaccaggaatgcgttcatccgggtttttgctgcttcgtcatgcaggagtgtgtgaaagccgttgcggccgccggacatggagaggatgggggtgagggtgattttcttttgttgggcgatgcggtagacgtgttcgttaggtgtgccgttgacaacgcccgttgggtctactctgtaccaggtggggacgagtgtgtcgattttgtcggcgtgggccaggaaggagttggtcgatttctcgctgttcatcaaatagaacagggccgttggattttttgcggtcgcagggagtgcaaaaatgagtgttagaagtagggcgaagggacgttgtgtcatacggggggagtccatcaaatggtgggtgaaagaggatggtgttgcgccatcgggaatgtctatggggctgaggggggacaggttgcagggttcggctgtttatctgtttatctggtgtagggggccttttattgaggtgaaaatgtgtttcagcggtgtgttgcgtgtgttttgagattgcagggtgtgtcaggtgcggtatgcggtgttatcgccgcggtgtagttgatctgggagcagtgtgccggttgggataaaggtgagtgagacggagttcaggcaataccgttcgtaggtcggtggcgggccgtctgggaagaggtgcccaaggtggctgttgcaacgtgcgcagaggatttcggtacggatcatgccgtggctggtgtcgtgttgtttacgtatgtgtgcgtgtgtgtagggttcgaagaagctcggccagccagtgccagatttgaatttggcgttggagtggaagagggggaggccgcagaagcggcaggtgtaggttccaagctggttgttgtccagcagtctgttgcagaacggtgcttctgtgccgtgttgcaggaggatgcggtgttcttcggcgttgagtgtggcaatcagtgcctcacgttgtgatggggatggcggggtcaggtcgaaagcgacattcatcgtaaggtctgaggagaggatgcggtggaagatgtcaatacgattgttgatgttttggattaagtcacgtttttgtggatggattcggcgatgtactgtgcagggtgtttggtgaatgttatttgagctgcgtttcactgttgaacttggttgtgtatgtgtggtgtgcccggtgtgatggtgtacgttgcgatgtcattttttggtggcatggttgccgtttgtgtgcggtgctgtctgggtgtgatcgttttttggtagggtccgggttagtttgaattttggggtgggtttcagtaataaaagcatgtgtagcagcttatagggtgctcggatatagtgctccgactgtgattgctgtatggaataatctggacggagatttcggatgcgcgtgctcattttgggaagcggcgtgatcggtaccaccagtgcctggtatctgtccaaggctggttgtgaggtagtggtggtggatcgtcagtctggtgctggtttggagaccagttatgccaatggtggtcagctgtcttttggttatacctcgccctgggcggcccccggtgttccgttgaaggctgtgagatggttgtttgagcggcatgcgccgctgtcgattcgtccgacgactgattggaatcagtatgtttggttggcacggatgttgcgtcattgctctgctgagcgctatgcagtgaataagtcgcggatgttgcgtctcagtgagtacagtcgtgaagcgttggaggcgttatctgctgaaactgggatcacgttcgaggggcgtcatttagggactattcagttatttcggacgcagcagcagcttgatgtggttgttcgggacatcgaactactcactcagtacggtattccatacgaggtgctcagtccgagtcagatttccaagtttgagcctggtttggccgatggtagcgtccgttttccgggtgcgctgcgcttgcctcatgatcagactggggattgctgtttgttcacgcaacggttggctgcgttggcggctaagcgtggggttgagttccgttacggttgtacggtgcaacgcttggaagtggatggtcctcgtgtgacgggcgcttggatcaatggagcgttggagcgtgccgattgttgtgtggttgcgctcggtagttattcgccgctgttattggcgccgttgggcctgcgtttgccagtgtatccgttgaaagggttttcgttgacgttgccgatgattgatgcgtcgcgtgcgcccgtttcgacggtgcttgacgaaagttacaaggttgcggttactcgtttcgatgaacgtatccgtgtggcgggtatggcagaggtctccggttacgatgtgtcgttgaatccacgtcgccgtgcgacgttggagatggtggtgcaggatgtgtaccctggctgcggtgatttggggcgtggcgagttttggactgggctgcgcccggcgacgccggatgggacgccggtgatcggtgcgacgccctatcagggtttgtttcttaatacggggcacggcacgcttggttggacgatgtcatccggttcaggccgttatttggccgatttgatatgttgtcgaccttgtgaaatctccagtgaagggttggatatgttccgttacttggtgtcgacgataccctgcccgcaagagtgtgctccgtgcgtcccgcccacgccgtaattgatctggatgcgttacgtcacaattatcgatttgctcgccgtcttggcggtggcaaggcgttagctgtggtgaaagccgatgcgtatggtcacggtgcggtgcgttgtgcgcaggctttggaggctgaagttgatggttttgcggtggcgtgtatcgaagaggcgttggagttacgccaagccggtatccaggcaccgatcctgttgctggaaggatttttcgaggctgaagagctggaattgattgctaagcacaatttatggactgtgattgcttcgtcctggcaggtgcgggcgttggctgcgttccacagtccatctccaattggggtgtggcttaagttggatagtggcatgcatcgccttggtttggagccaaaggagtttcgtgatgcttggatgtctctgcatcgtctgccgcaggtgggcgagatcgtgttgatgacgcatttggcccgtgctgatgagttggataatcctcgtaccaatgagcaggcatcggtttttgcacaggcttcgcagggaatggtggcgccagcaagtgtgtgtaactcttcaggtttgcttggttgggcagggttgtatagtgattggggtcggcccgggttaatgttgtacggcgtcaatcctattccgcaggagagcacgtcactgagtgggccattgcgtcctgtgatgatggtgtattcgaggctgatcgcggtacacgagttgcctgccggcgagccagttggctatggggcatgctttgtcactgaacggccaacccgggttggtgtggtagcgatgggctatgcagatggttacccgtattttgcggtcaatggtacgccgctcttggttgatgggcgtgtttgtccgttgatcggtcgggtttctatggacatgttgacggtggatctgacagaccatccgcaggcggatgttggcagtcaagtgcaattgtggggtgtgcaaccgggtgtggctgaacttgcggcacattgtaatttgagcgcttatcagttgttgtgcggtcttaagcgtgtacgtcgatactatttgggtgagatgggcgcagtgtgagggcaggggggctgctagtggagcagttttgtgtttttctagtgaatggtgcaacgttcactacggtcgtgtttttatggtgttcaagctgttttgggtcaaatgggttataccgttttttgttctctcaggagctgggggcggccattaggcgctgcggtcatcggcttttgaaagagcaatgtgcccgtttgttgatgtcaaaatggtttctgtttggtgacatgatatgacgtttttatgatgcggttcgtggtgatctaatcgtgttctcgacttgatatcgacacggtgcgtgcttggatagtacgttgtccggtgccgatcagtttcggggtccatggtggctactgcaagttttatctagtacggattttcttttggacacatcgcatccgcttgtcctgcagtcactcgacatcccatcggatgtctaccgggagatgctgtgtacccttgaggctggcttttgcatcgtgcagatagtgttggaggactgtcaagctgttgacggtatattccgtctgaccaatgccagctttggtcgccatctccggcttggttctgtggttggggagtccttgtgcgacatcatgcccgacgatgggccgcaatggattaagcgttatggtggggttgcgttgtctgggcagcgcgtccacttcgaggcgcgtgcgttgtgccgttggtattcggtggaagtgatgcgtgttggagcaccggagggcagattgcttggggttctgtttatggatgtcaccgagcgcaagcgtatggaacgtaggttggccgagagcgaggtgcgtttcaatattctggctgatggtttgccgatgccggtttgggtatttgatgcacagggagggatgcggttcgtcaatactgcgtatggggagttcttcggtgtcgatttgagcagtggcacggttccagagtggagtatggtgctgcatccggaggatgtgctgatattcgagttcaagttgagtgcggcgctgaagacgcagagtgcgtttcgtgcgttggtacgtgcacgtcgttatgacgggcaatggcgttggattgagatgagcgccacgccgcgttattcgcccgatggtcacttcatcggtctgacggggagcagtccggatgtgacggagcgtcttgagattgagttggcgcgtgagcagttgctgaaatccgagcgtgcggcgcgcaatgaggccgagaatatggcgcgattgaaggatgagtttctgtccacgctgtcgcatgagttacgtacgccgttaacgacgattttgggttggagtgaattgttgttgcaacgcattgatgagcagcatccttgttacaaagggttgtcggtgattgctagcagcgccaaggttcaaaagcgtttgatttcggacatgttggatctaagtagcatgctcctgggcaagatgcagttgaaaatggaggtgctggatttagtggaacagatccgcgaggtgattgggttgtatgagccggttgtcgatagcaaggggcaacggttgctgctgcgcgcgtcggagatgccgtgtttggtgttgggtgatgcaacgcgcttgcggcagatattcgaaaatttgttgtctaatgcaatcaaattcactccaacggatggctgcattgatgtggagattgatgccgatggcgacagtttccgagtatcggtgacggattctggtgatgggatcgctgccgaatttctaccgcatttgtttagtcggtttcgtcaagctgatggtacgacgacccgttgtcacggtgggcttggtctggggttggcgattgtgcagagtttggtggaaatgcatgggggttatgttggtgcgaccagtccggggattggtaagggtgcaatgttcacggtgtctttgttgcgttatgtatgtgcgatcgatgttgccgatactgtgatctgtgatcggcgtattggatcagcaggcgaccaaggggagtattgaagtgatttcattgttctggttgtaccaggatgcatttgcaaaatgccgtttccagcttggatgcagcattgccgttcaatgtcattgtgtggccggtgtcagtaaagcgctgtagatcgaatgtctttgtatttgtttgatgcactgctggtctcaatcgtcggtgttgtcgtcaacggaacagcggtgcgttgaaatctgttcacttacaacggagtcaatgtgaagaatgatttccggcaagggatggatgcagggataaaggcacgttttatttgaagcatcatgttgcggcctgtgcccactcaggttttggggtgcatgttgatgcggcgtgtggcgttaagcacgtctcggtggtgaatgttggtgttggcttatgggatgactttcgtatcggtttgaatgatggatgcgttgtggggggcatctggaagccgaccaagtgtctgacgtcatgcttgggggtggctgtaataagctgaaggtgaggaaggagcggggaaacgcttggaatcttcgtagtgatgaggacttaggagtttttggcgttgttctggacgctggtcggggagacaggattcgaacctgcgacctctacgtcccgaacgtagcgctctaccagactgagctacaccccgaagcaagcggccaatggtacggtgattccaacatattcacaaggattttaagtcattcggatagatctccagcttttttaaataatgatgtgcttaatgtatctgcgcttggttgtgtgctgatgtgatttgcacaaacagcgttgtggtttgtggtgcgattgtgttgctgaaagtggttaaaaacgacttggataggtatctgacgatggaacaggccgatctcatgttgtcgttatgcagtttgctgttctgaatttggcaacgtgttgtgtaccgctctgagtgttgtcagcgagatatgaggggcggtggctgtctctgctggaggtgggaagcatcagaaaaacagtttgtcaattgcaatcataatacgggtgtatcgttatttattggaaataagagtgacttatcagaatcgagcgctgtaatggtgttcgataggacgactccgcaaaatagcagattcaagcaggacgattgacgtttgcacgggtttgcttgggatcgcgggtggtgtgttatttcttggggagataaagcaatggatcgacgggtttaccgttgtagcggatctcgaaatacagcatgcggcccatttcggcaatgggttggtttgctttgacggtttgtccctcattgaccagacgttttcggttatggccgtatgcagagatccattgctcgttgtgtttgatgatgattaattcgccgtaacctatcagggccgatccggagtacaccactgtaccgttggcagcggcgcgaatggtttgaccgttgttgccgttgatactcacgccttgtttggtggtttggccagcgacgaaattgctgacgacagcgccctcggttggccagaaccaattgaaaccgctatttgccggagcggtgatggttgtcgttggggatgggtttgagggtgttggtcgggatgtgacgggctgtgtgggcgtgggcgatgctgttgcatcctctggatacaaacgcagtacttggcccgggtagatggttttggatgcagtgagcctgttccatgcggcgagatcttgcggtgcaacgccggtgcggcgcgagatcgcatacagtgtgtcgccctgtttcacaaccacagtttggttgggtttggcggtggtgcgtgagttgctcgtattgttggggcgtaccgtagtggcagtgctgcaggcagtgagtgctagtgcgagcgctgttgacagtaatagttttgatatctccattgacctttccattatccaaatttggttttccagataacccagccaaccagaccgatcagaagcgcactggtgatccagccaaggggttcaatccatcgatgcagtagggtttctgcgcgtttgccgccaagtttgattgcgccagcgactaagtagactcgcttgccgcggccgatcagcatgctgctcaagaacggcagtaaaggtacaccgacgatgcccgatgcccaggtgaatatttttaatgggatcggggtgaagccgaccaacacgagcagccaaaacgcgcgccatggcgattcgaggacgagctgttgcagttggtgtatttgcttatcgatggcttcgctccagcccaaccatgcgatcagtggttgcatcactgcaaatgcgaagtggccgagtaagtaacccagcagtgcgccagcgagtgagccgagtagactcagtgtggcgaaccacagtgcttgatgtcggttggcgagggacatcggtgccagcatcacttctggcgggacgggaaagatgaacccttcgacgaaactcagtcctgtgaggagtgcgggggcataacgatgacgtgaccagctgattgcgcggttgtacaaaggaccgaatattttcatcaatgacgtccttaaggtggatttaatccaacatccctggcagcagggatacaaatgtgactggttctaaaatctcgtgtgtgatgttaccgtcgattgttcgtgtgagctgcactagggcttgctctgaagcggtgccgacaggagccaccaggcgtccgcctattgcaagttgttcgatgagtgtgtcgatcagtgtcggggctgctgctgtgaccaagatggcgttgtaaggtgcgtgctctgtccagccgatgctcccgtcatcgtgtttgctgcgtatctttatgccaagctggcggaaacgcttacgtgcttgacgcagtagtttgccgatacgctcaatggtgtacacctccaatcctagtgaggccagaatggcgctctggtagccggaaccggtaccgatctcgagtattttttttggggcaacctgcatgacagcttcggtcatccgtgcgacgacccagggttgcgagatggtctgtccatggccgatgggcaatgcggtgtcttcgtaagcgcgcagcgccaaggcttcatcaatgaataaatggcgtggcacgatgcgaatggtggtgagtacccgttcgtcttggatgccgcattcgcgcagccgttcgaccaggcggtcccggacgcgttgcgacgtcatgccgatccctacggctttcgcttgcagggatgcaggtgcagtcatgttggccagtccatgtgtgcggtgagtctgtccgtccatcgggtgacattttccagggcttggtaacgggtcagatcgacgtgaatcggggtaatggagatgtatgtgttacgtactgcgtcgaagtcagttcctggaccggcgtcctgttcagggcctgcggggccaatccaatagatggtatgtccgcgcggatcggtttgagtgagacagggggcggagcggtgacgattgccaagccgggtgactttgaagccgcgcatctgttgccaagtcacatctggcacgttgacgttgaggatggtatcggcggggagcgggtcggtttttagttgcgccacaatgtttattgctgcgtgtgcggcggtttcatattgaggcgcttgctgtccttcgcggtagagagtgaccaacgatacggcgactgcagggagtccgaggaagcgtccttccatggctgccgatactgtcccggaataaatcacgtcgtctccgaggttgccggtgttgttgattccggagacgacgatgtctgggtcgtagttcagcaggccggtgagtgccagatgcacgcagtcggtgggtgtgccggcgacactgtaagtatgcatgtcgatttgtttggctctgatcggtgtgtccaatgtaagtgagttgctggcgccggaacggtcccgatccggggcaacaaccatcacttcgtgtccggcattgcgtagggcgtccgccaaaatcttgatgccgggagcgtcgacaccgtcgtcgttactgacaagaacgcgcattagtgttttcttgagtgagtgtcatgccattacatgatcgtatcgtgtaccaaattgaggggccaacacgatgatctagtgatcttgcgtgtttggcatgtgccttacatgatgccttgcactcggttcctaatgccacaggatttagagcgagctggtgttttttctaccggatggagctttgctgcgttcatcaatccgtatggtgttaggggatgcgaatgctttccggaattggcctgcttcagtgaagtgctgcatcaataatattttcttgtgagccaggattttaaacgtatcgtcgtgtagttgttcaacagtgttgataatgaggtttgatgttttggtaaacgatgcgtgcggtgtttttgcagttgctttgcctcagtgtgcgggtgctttggttcgtatgctgatgttgatgtgtgcgcgttgcttgctgaattggactgtggaaagaaaaaaaacatcgatatcgcttcatcatgtcgtgacgtggcattaagccgctgactgtggaaggagacgggatgatgaatggtgttaatgcagttgtttcgtagcaatggcaatgttgcggtattgcttaagtggtgggagtgtcgttcgctcaggtgcggtgtgtggtgatagagcatcgttgtcgttgtgtactgcatttttgttttaattttaaagggatcacggtgtgctgcattgatctgctgcagtgatccgattgggtcacgatgtgcattgcaggtgtgagtggcggtatgtttgcatcgttctaattttgcagtgatgttggggttgttttcatagtgcgcgtttgcatcggggtcatatagacagtcggcgctgtgtctgtttttttcagtgtattggtgatgtggtgaagatggagtgctcagatcagcagtgctgtgtccaggataagatgcgggtttttttctttgccttggtgtcatattgagatcgactctcaatggggattacgatcatcgtatgtctgttatctgttatctgttatctgttatctgttatttgcgttggtgtgtggaatattgtgttaccagcgatcttggtaatctcattccgggaagcgtgtatcagcggatgggttggttttgaataggaaagcggcattgataccgataacgcggtgctcgcattattccggacacactgtcattgcagcgtccattgttgtaaccgcaattcacgttgcaaacatccgttgttgatcgcagttgaatacagacattgtttcaagagggaggttgaatcctagcctgctgatcacgtggtgtccggaatgcggtgttgcttggcgtgagttatatcggtgcagcagcagcgtcacactgaaaagcagcaggtgctgtgttaatacggtcggtatggggtttctagcgattggagttgctgttgatcagttgctatgtagagtgttgatgcgtgatgcgttgttgcattttgtgatggtcaaggggcgatggtgttatcggtctttggggctgttcctgcgttgcctctgcggttgctgatattcgttttagccacatatggcggtggttttttgcgggtgctgttgcaggaagggttcccatgttctgtggttgtggagtttcattgtttccgcggcaagcgtagttcgcctagagggcttgccatgcggaacggtacggataccaggtgcagattgcgattcagttgtattgcaaagtgtaagtggggagcggtgctgaagccggtattgcctgacagtcctaagcattgtccggtggccacgtggtcaccctgatgcacggtgatgccgtccgcagacaggtgtgcgtatatggccatgctgccgtcttcgtgcaggatgcgaatcaggttgccgcccccaacgtggtgaccattggtggctttttcttgaaagccggtttgaacttccatgatgcgtcctgcgcgtgcggccaagatgggggtgcccttggggagggcaaagtctagcgcgtagtagttggcaacgtcgtggtggctgaatgtgccgccaaagccctgatcaatgcgaatgggggtgatgtcgaatggcacacggtagatgctgtcatcggcgtatccgtgcggatctcctggaacaacctccaggcggatatccacgccttggtacagcacgtttttacccgggtacagttgtgccagtgcaatgcactgccctgggggcaggacggcggtgatggggagtgcgggggctgtatgtaatgggactgatccggttgcgatcagtctgacttgcgccggtcctgcgagtggattgcttgctttggcggtgtagcgatccccatcgtgttgtagatccagccaggaattgggggtggtgatgcatgaggtggtgggtgaggcggtccttggccacagtgtggtgcgccagtcgggtcggtcttgggcagtggagggagggggcatcatggcgatcagtacggcagcagacagagggagcagatgggatggcatggtgttgagtgtgagtctgtgcagaaggtttgagtgatgagtggtgctgaattttgattagataaaaatgtatctttctatccgtatggagagattgacatggttgtgtgagggtggcattttgggaaggccattgagagcgtccgacgggataagccctgcgatgctgaagcagtcagtacggcgcgtaaagcgcctgtaaagcacctgggtttgatgtggaattcagtggggacttccgcgtctgctaaaggagggggcaactccgtgccctttgctcgacgcacctggctttctatcaagctcgatgggtcgttgctttgctggagactgctatgagatccgtaaacccctcattcactttttgtcttgatatgcccactcccgatgatgatggccagattgctgtgcgcggtgaaatcatggtgcctctgtcgatgtgccatgccggatgggtcgatctgcgtttgcgttatgagttgattggctgcgctgctgggccggtggtgtttgtgcttggtggtatctctgcacatcgccatattgctgcgactgctcgtttcccggagaagggctggcttgaagggttggttggtacggagcgtgcattgaatccggagcgtttccggctgctttcgttcgattttctaggtgctgatggccaacttgatgtgcccattgataccgccgatcaggcggatgcgattgctctgctgttggagaggctggggattgctacgttgtatggtttcgtcggttattcatatggtgcgcttgttggtttgcagtttgcgatccgtcattcagagcgggtacgtcgcctgatcgtggtcagtggcgcacatcgggtacacccttatgcagcggcttggcgtgcattgcagcgccgtgcggtagcgctggggcagttgcagtgtgctgagcatcagggtttagcattggcacggcagcttgcgatgctgagttaccgtactcccgaggagtttgaggagcgttttgatgcggcggcgcaagtgatcaacggtcgtgtgcgtgtggccgctgaggattatctagacgctgttggcgctcagtatgtggcgtgtactccggtcaacgcttatctgcgtctgtccgaatcgattgatttacaccgtgtggacccaaggcaggtggtggtgcctacggtggtggttgccgttgagggggatcgtttggtgccactgtccgatcttgttgcgctgattgagggtttaggcccgtgcggcagtttgcgggtgttgcgttctccttacggtcacgatgcttttttaaaagaaactaatcgcattgatgcgattcttacgacagctctacgtcctataggagaatccatatgagtattcatgatgtgcacgaaggcacgtgtcacgtgaccacttccgcggtgcgtgctgggatcgattccgacactgctcatggggcagtgacgccaccgattgtgctttcatccaacttttcgtttgaacgtttcggtcataagcgtaagtacgattacacacgtagtgctaatccaacccgggatctgctcggtgaggcgcttgcggagttggagggtggtgtcggtggtgtggtcacggcgactgggatcgctgcgattatgttggtgttgcacgcattgctccggccgggtgatcgtttggttgtgccacatgatgcttacggtggcagttggcgtttgttcaatgcgctggctcaaaagggacattttgaattgatcacggtcgatttgacggatgcacgatcagtggttgaggcattggcactaccaccgaagttggtattgatcgaaactccttccaatccattgttacgtattactgatttgggtgcggtgattgaggcagcgcaccgtgttggtgctttgactgtggtcgacaatacgtttatgtctccggtgttgcagcgtcctttagagttcggcgctgacttggtattgcattcgactacgaagtacatcaatggccacagtgatgttgtcggtggcgttgttgtggcacgtgatgttgcccactatcagcagttggtgtggtgggcgaatgcgctgggtctgaccggctcgccattcgatgcgttcttgacgttgcggggggtgcgcacgctggatgcgcgtttgcgtgtgcatcaggagaatgcgcagatgattgcagcgttactggaggggcatggtgtggtgaagcacgtgcattacccaggcttggcttcgcatccggggcatgtgctggcggggcggcagcaaaaagggttcggtgccatgctcagtttcgagttgcagggtggggaagcggcggtgcgggcttttgtcagtggcttgcgttatttcacgctggctgagtcgctgggtggggttgagagtttgatcgctcatccggcttcgatgacgcatgctgccatgacgccccaggcgcgtgctaaagcgggtatctctgatgggttgttgcgcttgtcggtggggattgaggccagtgaggatttgatcgttgatctggtggctggtttggggcgtgctcaggcggtgtgtgatggggcggcgcgggaagagtgcaacgtgtgagtatggggcgggtcatttgtttactcgttagtccgatgttcgttgtgctggatgatgcacgttgatgggtgtgctaacggttgcttcggtgactcgctgtggtgatgttctcggtgtggtttgtgctgctttatcaatgtgggtgatagggagtggggatttcttgattaggttatccgcacgatcaggtgcagtaggtctgggtgatctgcatggttgatatgtagcggtggctgtctgtcgttggggcagtggcagatttagtgtgtcggtgtttgatccattgtgggggtattggtgctgtggtgatgtggcttgtcgatccgtgggggtggatcagagcggtgatgtggtgggggcagcatcgtgttatacctttcagcagatgtcgaaagtaagctacacctattgcaaatagggaggtgtcacatgggacacgaccacacgcatgtaccgaaggggatgcatcacgagcgccccttgtggtgggcgcttgggcttacggcgagtttcctagtggccgaaattattggtgcggtgctgacacgtagtttggcgttgttgtctgatgcggtgcacatggctaccgacgtgttcgcgttaatgattgcattggtcgcggtgcgtctgagtcggcgtccgcctgatgtgcgtcgtacctatggttatgcacggttagaggcgtttggtgcgttggttaacggggtattgctgtttggtgtcggcggttacattttgtgggaggctgtgcagcgcttgcgcgctccgcaggagattgtgtccagcggtatgctggtcattgccgtcttgggtttggtcatcaatctgatcgtaatgcgtttgttgcatgccggtcgtggtgagaacctcagtatgaagggggcttaccttgaggtgtggagcgatatgctcggttcggtcgctgtcatcgttgctgcgatagtgatctatgtgactggttggtattgggttgatccggtattggctgtgttgatcgggctatgggttttgccgcgcacctgggtgttgttaggtgaggccgtcaatgtgttgttggaaggggtgcctaagggatttgagttgttgcccatacgtgatgcgctcagccatcatcctggtgtggccaatgtgcatgatgtgcatctctgggcattagggtccaggatgccgttgctgacggcgcatgtggttgcactccaaggcactgcaccggataggttgcgccgcatgttgcaggagttgttgcatgagcgctttagtattgaacatgtgacgttgcaaattgagatcgagcattgtgggagtgatgcttgtgacgcgaagcgttcatagtgtttcaatgggcgtttgtggtttgccctgatgtggggcgcgaatgtcgttactggcgtcgctgtgctgttattgaggccgaattccgctccggtcgaagtgctcaatgacattaatggaaatgtggtcaatctgtcccgttgtgtccgtcaccatctcgacccatatgtgtctgttaccccaaaagtcttacagcctgctggtgctttccctgataacgacacccttgcttcatccggcatcatcctgccggacgcggggccatggttgccgttctacccgcggggcgctgggcgctggagaagtgcctttaccggcaccttagtcgttttaataactctgtcttggatctgagttaaagatgccggactcaatctacatcctttaacgattgaaccatttcaaacaggtcaattgcacttttgttgctatctccaatgtggaccagaacgccatccttgacagtgctttgagtaaacggcccgctattctttaacatctgaaaatgattcacacagaaccccaatttccgctccgcaattcctcatttccattaaaaatccgctgaaaagaacaatgagtaatttcactcattgccgagttggaatccaatgcaaattattgatctttataaataaaaaacatgcatttcctattgttgtacggtgaccgtaccatccagttcagcgctggcgaaactggatggtgttgtctgaatgtcgataggcttgttaggcgagttggctatgttgctttactttgctgaagtggcgggttttttggggagatacaagtcggtgatggtgccgtcgtagacttcggcgctcatggcaatcgattcgcttagtgtggggtgtgcgtggatggtgtggctgatgtcttcggcttcggcacccatttcgatggcgagtccgatttcagccaagaggtcgcctgcgtggacaccgacgatcgctccgccaatgatgcggtgtgtgtcttcgtcgaagatgagtttagtgaagccttcagtgcgtccgatgccgatagcgcgaccgctggcagcccaggggaatttggcgacgccgatgttcaggcttttcgctttggcttcggtttcagtcataccgatccaggcaatttccgggttggtgtaggccacggatgggatcacgcgggcaacccattcccgatgtttgccggactctgtttcagcagcggcgacttcggcggccagtttgccttcatgtgtggctttgtgcgccagcattgggttaccaacaatgtctccaatggcaaagatatggggtacgttgctgcgcatttggcgatcaaccgggatgaagccgcgttcggtgacgttgacgcctgctttttcagcgccgatgttgttgcctgtcggtgtacggccgacggcaacaaggacgcgatcataggtcgatgtttttaatgcgggttgtgtgccttgggtgggtgcttcgaatgagacggtgattccttttttgtcggctttgacgtggctcgctttggtgttcaggtgtatttcaatgccttgttttttcatgcggtccgccagtggcttcactagatctttgtcggtgccggggatgatctggtccatgaattcgacaatggtgacgtggctgcccagggcgttgtacacggtagccatttctaggccgatgatgccgccaccaacgacaagcagtttttttggcacttcggccagttccagtgcgtcagtggagtccatgatgcgcgggtcgtcccaagggaagtttggtagcttcactgggtgtgagccggtagcaatgatgcattgttggaaatggagtcgttgggtgctgccgtcagcagtggtaatgtccagtgtgttgggagagacgaagtgcgcgatgccggtgacggtgcgtaccttgcgttgtttggccatcccggccaagccggcagtcagtttgttgactacgttttgtttgtattcgcgcagtgtgtctagggtgattttgggtttgccaaaatcaattccaaaggtgctggcatgtgcagcttcgtcgatgacggcggctgcgtgcagtaatgctttggaaggaatgcagccgacattgaggcagacgccacctaggttgggatagcgttcaacgaggactgtatccaagccgaggtcagcggcgcggaatgctgcggtgtagccgccgggaccggcaccgagtacgaccatgcggcacgtgatgtcggcgtgttgttgatcgggggctgtcggcttggaagcggctggttggggggatggcgggggcggtgaggtggtgtcggatgtcgccgtgttgcttggtgaggggggggcggtggtgtcttcggtctccagcaggaggatcacgtcgccttgtgaaagcaaatcgccgacgttgactttcagttccttgaccacgccattattcatcgatggcacttccaaggtggctttgtctgattctagtgtgaggatcccttggtttttgaccacgtggtcgccaacggtaaccagcacttcgatgactgggaccttgctgtaatcgccgatatcgggaactttgatttcaatcaccgtcataggtgtctcctgtcgctcggtggtttgtgttggtcagcgtctttgtcacagcagtacgcgccgcatgtcggcgagtatctggctgagataagtggtgaagtgtgcggccaaggcaccatcaatgacgcggtgatcgtagctcagtgacagcggcaacagcattttaggtgcgaattgtgtgccatcccagatgggttggatgagggatttggagacacccaggatagctacttcaggtgcattgataataggtgtgaatgcggtccctccgatgccaccgagtgagctgatggagaagcaaccaccgctcatgtctgctggggtgagtttgccatcgcgtgcttttttggcgagatcgctggtttcttgtgcgatctctacgatgcctttttggtctacgttgcggatcaccgggacgacgagtccgtttggtgtgtcggcggcaaaaccgatatggaagtattttttgagtgtgagcgtttcgccagtggcatcaagggaggcattgaatgttggaaattttttcagtgctgcggcgcttgctttgataaggaaagccagaacagtcagtttaatgccggttccgttcttgttgggtgcggcattctctttattgatttgtacgcgcagggcttccagttcggtgatgtcggcctgatcgaattgggtgacgtgcgggatcatcgcccaattgcgggcaagattggcaccggaaatctttttgatccgagataaaggctgggtttcaatttcgccgaatttgctgaaatccacattcggccaagggagtaagttgaggccaccatttgtggtgattgaagcggagggtgttctgccttcaggaataccagtacctacggtggcgttgacgaatttctgtacgtcttcgcgggtaatgcgtccatttttctcgctgcctttgatgcggctcaggtccacgcctaactggcgtgcaagcaggcgtactgcggggctggcataggggatcttggacggtagcacggtgttggcgtcgaaggtgatcggtggggtgctcggtgtccctgcaggggatgctggggcggagatggcatcgcgtgcagggctggaattgggtggcaatgctggtttgtttgtggctggagtgagtggggtgctctctgcgctttgaagcacgacgacgatgtcgccttgcgacaaggtgtctccaacgttgaccttgagttgtttgatgacacctgtggcggaggagggcacttccaaggttgctttgtcagattctaaggtgattagactttggtctttggagacggtatcgccaacagtcaccaggacttcgatcactgggacgttgctgtaatcgccaatatcggggacacgcacttcgattaagctgcctccgtcttctggaggtgcagcgttgtgagcacgcgtggctggcgtgttaacggtcatgggtgtggtgactccggcagtctcttcggagacttcgattaatgcgacgacatggccttgggataaggtatcgccaaccttcacttttatttctttgatgataccggccgttgacgagggtacttccatggttgctttgtcagattccaaggtgatcaaactttggcccttggagacggtatcgccaacagcgactagcacttcaatcactgggacgttgctgtagtcaccgatatcggggacaaaagcttccttgatttcggtcattacagtactccggctacaaacaataggggtgtctattgtggctggctcagggtgcagcgccaagcagtgggtaatgatgtcaaaaatgagcttcggtgtcggtcaggatttttttagtaagcagaaggcattgctttttggatgcgtgtccggtgttgcgtcgtgtgggtgctcagtgtggttgcagtgcgttggctgatttaactcaggtttgtgttgggtgctgtatcgaggcgttattgccggtcatgagggctggcgatgacgtcaggggcagggttgcggaaagcggttgctttttctgttttttgatttttgtggcgtgtatatgttcgttttttacagtgttttagagcgtggcgtggacttcgttgggtggctcgttcgtaggtggtgtcataggaatgatgttgattttcccgtcatcgtggataagtgtgcggttgggctgcattcggtttttgtctgaaatccaaacaaagtgcggtacctgatttcagatggcgggtatcgttggaacaggggacgaatgacgtaactcgtgtagctgaacgacggctacggatacacggagatgatgaagaaggggtgttggaagcgaagctactcacatttgctgtactggatatgactattgactgaatatgtcgcggcaaacgtttttcgagtggaacgcttggcaggattacgtccggcgcctcatggagcgctgtttatgaaacgatgtgccgattttttggacgcatttgatatttttgccgagctaatttcagtgtacagtgtcacagttgttaaaaattcatcacttggacgccaagcgttgcgcttcccaattccaagggtgagaatgaacagttaaggaactaggagaaagattctatgcgtaaaatttcactgattggcctagctactatgagtatgctggcctttaacacctcagcctttgcgttgggcgcgacttcttccaacagtgatgcctccggcaagcattggtcagtggttggcggcgccaccctcgtgcaaccaaagaatgggaaaatgcagcacagaatactgtcaagtttggtggcgatgttgcaccaacgcttagtgtcacctactacatcaacgataatgtgggattcgagctgtggggcattactaaaaagttgagttataccgcaaagactgacgcatcgggcaagatcggcaatgtgactcaaaagacaccgttagcgttgagtgcgcagtatcactttggtcaggcgcaaaacgtgttccgtccgttttttggtgttggttattctcaagctaagtctaaatttactgctctgggatctactgatcgtgtgaatcttggcaatttccgcggtgcaatcggcacgattggtttagatatgaatgttgattcaaattggtttgctcgtcttgatgcgcgttatacgcgtttcagtaatagcaatagcaaggcggctctgtcttcaagtttgggtctcgatcagaaccggagactggatccgtggtccgtgggtttcggcatcggcgcgcgtttctgaaagtttagagctctctccaataacagcgtaaaccaagacgggcccaccagggcccgtcttcttgtttgtacatgtcctttgctttgtagaccgattgggacacatctagaacgcaggtaatatcgcactgccatactttttatcaatgaagtctttgacttcagggctggtcagtgcttttgccagcttttgtacccgtgggtcgtctttgttgtcttcacgtgagaccagataatttacatacggggaatctttgttttcgattgccaatgcatcttgatttggtttcagcccggcactcagtgcgtaattggtgttgatgagtaccaagtcgatctggtcaagcacgcgcggtagcatggctgcgtctaattcgcggaatttaaatagcctgggattttcgagaatgtcgcgctgagtcgctagcatgttcttaggatctttgagtttaatcagccctgcttggtgcagtaggataagtgcgcggctgttgttactcggatcgttggggatcgctatttctgctcctttgggtagtgatgcgagtgctgtatagcggcgtgagtaggcaccgaacggctcaatgtgtacaccaacgacggtgatcagatgcgtgttgcggctgcggttgtatgcttgcaaataaggctcggtctgaaagtagttaacgtcgatttgtttttgagcaacctggtcattgggttgcacgtaatcgttgaatacacggatgtcgagttggatgccttgtttggccagtgttggcttcacaaactccaagatctcagcatgcggtaccgcagtggcggcaatactgaggcgatcatggttgctgtcagaagggccgcagccgacgaagaggagagtggcgacacacagtaggaaatgcttcattgcatagagtcggttatgaaagatagttggaaatgcgcgctttactgtagcaaagcatggccgcgacatttgcttggtgatgtgtattgaagctcagcgtcggctgtagtgtgcgaccaaccaatcaccaaacatctgtatcaattgcaccaccatgagcagtgcaatcacagtgaccagagcaacgtctgtgtgtgagcgcagatagccttcgcggtaggcgacgtcacccaatccccccgagccgatcgcacctcccattgctgtaaagccgaccaccgcgattccagtgatcgtggcgccagcaatcaaaccggggcgtgcttctggtagcaggacccgccagatgagttgccaggtggttgctcccatcgcttgtgcagcttcgacgacgccacgatcaacctcgcgtagcgcgctttcgacgaggcgtgcgtagaacggtgctgcaccgatgactagtggcaggattgcaccacggatgcctagtgaggtccccatgatcagcaaggtgactgggatcattgtgatcatcaaaatgataaagggcaccgagcgtaatagattcactgccagtgccagcagggtgtacaccaggggatggctgcgcagttgcgatgtgttgcataaatacagtgcgattcccaagggaagaccaagcgccaatgcgggtggcaatgcacctccgaccatgaacagtgtatcgagtgtggcgcgaccgatgtctttccacttatcaacgtccaggttgacgaaaaaaccgggagcggcgattgaggggaagatcatggggatattcatgcgcgtagctcctcaatatggatgccggcagcagcaaacgctgcctgtgcggcgactgggtcgccgccagacagcgcgacagtcaattgtccgtagggtgtttctttaatacggtcgatacgacctgacaggatgttgtagtccaccccggtttctcgcgccacacgtccgagcagtgggaggtaagtgtccgttccgatgaaggtcaggcgcacaatgcgaccgttgactaatgagaaatcctgatccagcgcgcttgtgtcgatgtgctcggtttccatgacgaagctgcgtgtcgttgggtgctgtggatgcagaaagacatctgttactaatccggtttcaaccaggcgtccagtatcaaggacggcgacgcggtcgcagatgcggcggatcacatccatctcgtgagtaatcagcacgattgtcaaaccaagttcacgattgatccgtgccagtagctgtaacaccgtggtggtggtttgcggatccagagcgctggtgacttcatcgcatagcaggatctgcgggcgtgtcgccagcgcacgcgcgatgccaacgcgctgtttctgtcctccggatagctgtgccgggtaagtattggcatgtgcttctagaccgacccaggccaacagctcagccacgcgtgcgttgatcttggcatcagatgcaccggtaagcttgagtgggaaggcgacgttgccagcggtatacgaagacagtaaattaaagtgctgaaaaatcatgccgatctggcgacgtagtgcgcgcaaccccatgcgatccagtacggtaatgtcttgtccgttgatcagcaaatgtccgccgctgggttcttctaagcggttgatcatgcggagcattgtcgatttgcctgcgccagaatggccgataatgccgaacacctccccggcatggatctccagattgagaggctgtaacgcagtgacctcacggccattggcgccatagtgtttgtaactatctttgaactgaatcactgtggttgcagcgaaataaaagggagtcaagcctatcaggctcggacgatcggcattatttcatgtggtgtttgcattatggcggtaccgaagcagtgcggtgttgtcttctatttttcttcactcatcgtcttgtctgatgtgtctgaagatgtcgatgatgtttagggtgctcgagacgctctacgcatgaaggacgtgttctaacgtttgggagcgacagttccaatgttgatcgcaccaggtcgatcacacagatgcgatggtggatgcagtgatggtctagggccatcgcgatggaccgactctctaacgatgattggttggtttgtgacccaccaaggtcagcggcgcagcatgggaacacgggaaatcaatgcgctgtcattctcgaaaatagtgcttgaaattttgttctcaatagtcgatgaggcataaacgttggttttttctctctgattctcttctcacttgctttacgctcccttgcactgctaatgcctctcgttgttggtcggtgtgttcgatcttctgtggcagtcgacatacagcgttgtgttgtgcagatcgctgcttcgccatgagcaacacaagctcaaggtgtagttctgggccggatacgctacctgtaaagtgcgcaatgcagcgtgcccgatatgcactgcaatgtgcgagcacggcgtaaacgtcgtgatttgattgaaagaatatggccgtaagttccacagtatctgtgatatctaaagcccatcacagccgttgttgcatgtgattgctctacacgcgtttttcgaggtcacgttatggatgcaatggtctgtattgttccgcgaatcgtgcttttcttaatgatggatcagaacaccatgagcgcatgagaaaatgtggcacctggattcacagtggccgatgtcagcgtcgtacgggaccaattagcctgacattgaacaggagcgactgatgtcgcactgttcgatccttgagtagtgttgggagtcctctgccgacgtagacgtcgtttcacatgcggtcatcagacgttcggtcagtttgtgcagcgcggttgcctcttgttccaaatgggcgaggagagccgctggcaagttgtgcatatcatgtctccaaatcttattagcactgcaacaagcaaatttcaggccaatttatttggaggaccgtatcagcttgtatttgaatgcgtgctgtgtccctggatgcagcgacgtgcccgcattcatctattggtatttgtagtcatgcatggtggggagggcagaaggccaaagaaaaacattgggtagaatgcatcccgggcaggcagctgaatatggacgcttgggatttttgatggctaccccaattctgatgtatcacaacattgcgaaagtgccgaagcaggtgcgacatctgcgcggattgtatgtgacgccgacggcattcgcgcgccagatgtggctactgcaccggcttggctattgctgtctgtcgatgtctgccgcgatgccgtatctccgtggtgagcgttcaggaaaggtcatggtggtgaccttggatgatggttatctggataatctgcaagcggcgcttccggtgcttcaggcgcacggtttcagtgcaacctgttacgttgtcagcggtagtctcgctcgtttcaacacgtgggatgcggaacggctcaacgtgtgcaaaccgctgatgagtcctgcgcaggtccgtcaatggcatgacgctgggatggaggtgggggcgcatacacgtagtcacccgcatctcagtgggtgtacagcagcgcaattgcatgaagagatcgccggttgccgcgatgatttggagcaatgtatcggtgcgccggtgacccaattttgttatccatacggtgatgtgacaccgccagtgatcgatgcagtctgtgatgccggctatgctgcggcgaccacgacgcggcgtggtcgcgtcttccccggccaacatttgtggacattgccgcgcgtgccggtatcgtaccgtcacatcctccctcagttcgcgttacgtacattgactggttatgaggatcgtcggatatgaaggtgttgtttgtgggaacgtcccgtggaggtgggggggctgagagtcattttgttggcctggtgcgcgcgatggctgagaccaatcaccagagtacggtgttggttcatccggatggattgatcgcacgtcagttgcaacagacggcgatacggctgtttactgccacgttccgtaacgtgatggatctacgtggctacctagcgattgcgcgtgcgctgcgtcttgttcatcccgatgtgttggtgggtgactttggtaaagagtattggcctttgttgttgatgggacgcctttaccgcttgccggtggtgctgttccggcatcgcttgccaccgatgaactgtttttcgacctattgggtgccgcgcttggcagatcgattcttcgccgtctctgcttacgcgcgccgccactatttggctgaagggatgccgccagaacgggtacaggtgttgtataaccctgtggatactgacgcgttacgtcccgatccaagagtgcgtagagcaatgttgcatgagttggggtgggatgaggatgtccttgtggtggggtgcttcggacggatccacgaagggaagggggtgttcgtccttgctgaagcaatggagcaggcgatgcaggaggagccgcgtttgtgctgtttatggatgggtacaggactgcacgtgcagcgcttggcagccaccgttgccggcagccgattcgcatcgcggcagcgtgtgttgggttgggtgactgatccggcgcgttatttccaggcgttggcgatgctggcgatgccttctttgttgccggagacgtttggacgtgtctccgcagaggcgcaagcatccggtgtgcctgtgcttgtgagtgatgtgggtggggctgcggagacattgcaggatggtacgaccgggatgctgctgcccgccggggacgtgcctgcgtggcggaatgcgattctggcattttgtgatccgcaaccccgggccgcgatggcagcagcagcgccgagttttgtagaggcacgtttcagtcagcaggtgatcgcagcggaatttatcagtgaactggagcgcgtgatttcagatcgtcatcacatgattgcaccaatgcgctgacgctccagaccatctcatgcaaataggcttgatctttcctttgcctgttcttgtctgcattcactaacattcgtgattttcatcctcgccatgtgtgtttaggcacacttaaaccattcgggatcaatacgtagatgcattcacttgagcacttgctgcaaaacaaccgcaattggtgtgagcggattaaccaagaggacccggagttcttcgcgcgtctgtccaagcaacagtcccctgagtatttatggattggctgctcagattcgcgtgtaccggcgaaccagattatcgatatggcgccaggggaggtattcgtacaccgcaatgttgctaacgtggtggtgcataccgacttgaattgtctgtcggtgattcaatttgcaattgatgtccttaaggtcaagcacatcttagtggtggggcattatggttgtgggggtgtccttgccagtttgactcgagcgcgcctgggcttggtcgataattggatccgtcatgtgacggatgttgctgagaagcacaactcctatttggagacgatcgtcgcacttcctgaccagcatgcacggttgtgtgagctaaatgtgcttgagcaagtgctaaatgtgtgtaggacgagtattgtgcgtgatgcgtggagtcgtactcagccgctgactgtgcacggttgggtgtatagcttgtccaatggcttggtgcatgatcttgggattgatgtggatcgcttcgagatgttgccgtcgtgctatgccgatgcactggcaaggattcaggctgatcaggtggtgcattgaattgtgttttttattcgcatcactatctatgaatgtatatagctccaatgaagacacgccgaatgcgcctgacatgctgtcttggcgtgtacacactcagaagaatgaccccttaccgttgcccgaactgaaggcaaggttgttagcgttaggtattgatgcggatagatacgcccgtacgactgggttatcaattgagttagaacccaccacgcttgccgatgctggctatgaccgttaccagcgtccgttattgctcactgtcgatgcagcgcgtgcctggcatgcgatgcgtcaggcggctgtacgcgatgggattgttcttgatgcgatctctggctatcgcagttacgcgtatcagttcggtattttcgagaataagctcgcgcaaggaaaaacattgcaagagattctcactgttaacgcggccccggggttcagtgagcaccatagcggcgaggcgctggatattggcatgcctggggagccgcctgtggaggaaaattttgaaggtagcagcgcgtttgcctggttgcagggacacgctggacgattcggtttccatctcagttatcctcgcaacaatccacatgggattgtctatgagccttggcattggcgctggcgtgctcgctgagtattcgatcttgatcgctgaagtgctccatggttctgtctttggatcaggcgactgcatcgtgtgagcgattgtgtggagcgatggttgcggcggttcttctgacaccgtgtcgttctgccgtgtccagtgctttggagaagcgcaggcctctgtaacgctttgatgctttgcacgagcgcatctagtaagcggtgattgtttggtgtgctgaggcgaaaaaacgtgggaaatcatccgatccggtgtacaccggacgcttcgcggtgtgaagtcggggaatcgtgccgtgattccgtgggagcagtattgctgccgttgaaaaacgcgcgtacctcagcaatattgcgtgtctgcgggaatgagggcagcgaatctagaaagatccgtccgtagcttttggacagcagtctcgggtcacacagcaccagcacgccgcgatcagactcgctgcgaatgagtcggccaacgccttgcttcagtgcgatgaccgcttggggcaattgttcgtcaaaaaatgggttgccgccttcctggcggatggcttccaaacgcgcttcgaagactggatcgtccggtgcggtaaacggtaacttgtcaatcacgaccacgctcaacgccccccctgccacatccacaccttcgcggaagctcgctgagccgagcaataggccattgccggagactcggaagcggtccaggagtgtggcgcgcggcgcgtctccttgcacgaacaagggccacggcccgccgcgtagcgctgtggcggcttcgcgtaacgcacgatgtgaggcgaacagcaaaaaagcgcgtcctgaagaggcttccaacactggaattaatgcctcaatcaaggcgactccgaagccgtgcgtcgctggattcggtaagcctggaggcaggtagcataatgcttgccgcacccaatcgaagggactgggttgcagcagtgtcatgggatgattcaggcccagacgtcgtgcgatatgttcgaatgtgccatccaccgccaatgttgctgaggtgaacacccatgcggccattgatgtttcacggtgtgcttgtaattgcgcggagacatccattggggtgcgctgacagcgaaagctgcgctgtgtcagttcgtaccagagcacgtcgttgttaggggggggatccccctcaaacccgcttgtttcggccgtttcccccagccaacgtaacagccgggacagtgcctcctgggcacgtgcggcgcaggcatccaagcctgctgcggcgctgcgcagtggaaccagcagggagtgcagcgaggtcagcgcagtgatgagagtttcaaatccctcacagacctctggtttagcgagtaggcgcgattgcgtgccgcgtgatggcaaaccttccattgccgcgcgcagcgtgcgtaaggcctgctccaattgccatacggagtgttgcagtgcggcctgcgcaccagcgaccgagcgtgcttcgatcatgcagtcgcgtcccagttcttgtaacggacgcatgccgaaactctcgccaaagaagttggcggccagtgctgggagttggtgtgcttcgtcaatgataaatgcctgtgcccctggcaatatttcgccgaagccttcttgtttgagtgctaagtcagccagcagcagatgatggttgacgacgacgacatccgcagcctgggcacgctgccgtgcttgcacgacaaagcattcattccagaatgggcaatccttgcccaggcaattatccagtgtcgaggtgaccagcggtaggagcggtgagtcgtctggcaacgtgtccagttcggccatatcgccgaattgggtgtggccgctccaggtgaggatgcgttgcagttgcgtcgtttgctccgcggtgcctagatggggcgcagcacaggtctgctctagacggtatttacacacatagttggtgcggcctttcagcaatgcgctgcgcaggtcgacgccaagggcagcgcgtacccgtggtagatcgcggtggtagagctgctcctgtaacgcgcgtgtgcctgtggaaatgatggttttcagtcctgacagcaacgtcggtaccaggtaagcaaaggtcttgccggtgccggtcccggcttcagccagcagaatgttgcgttgttcaaaaatctcgccaattgccgcagtcagccgttgttgccccggacgcggaacaaaattatcgagtcggcgtgccaggaggccgccatcgctgagtgcttcgatgctagcccgggaaagcagggacatggctacggtcaaggctctggaaaaacacgcgtgaggtgcatcgtggcgggaggacaaggggcgcagcagcgtgctgcaatgcaatggtggaccaggcatgttgaacgtgccggtatggtttagtaacgcttgatccctggcacagtgcagcgtccaatctgcgtgtgcgctgaggatgcattttctttttcaccgcgtgccagtcgtgcttgctcaatcgtggcccagtggcggcgacagagtgggccggttcttgagccgagttctaccgcacgtttggcgtagtgttcagcaccggtccagtcgctctgcagcagggcgatttcagcgcgctcttgcagcactgccggatcattggtgacgagttctagcgcgtggtcaagtgcagcggcggccgcagccaagttgcctgcttggcgtttggcttttgcggcctgacgcaggtcatcaatttgtagatcatgcagcggttgcaccaacaattcggtgtcatcggcactggcaatgttggtcaccgcagccaaacgctgcgccggggatagggtgtctacagggggcggtgtcgcgggtggtggtgctggtgttgcaggttgcggcgggctgatacaggcagtaagagccacgggcatcatgacggtcacggtgaatgtgcggaacggaacaggcaatcttttcattgtgtcgattgatcgggaggaggcgttgtggggggcgatgcttggtcccccttctgcttatccagcccgaaccagttacgccagccgatattatgcccggcttcgggtgctccgccagcaccagagcatgctgcataaggcggagcgaagccggctacaaacggaaagcggcgtgcgcctgggcagtttgcgtctgtggtgccagtgcccatcggctcgactgactgccaatccagtcctttgccgttgacttgtaatctggtgcttggtaactgcgagaagatgctcgaccagacgcgcatggcaccggtggcgccgtataggccagtttgctcgttttggtcgttgccgacccaaatgacagccaagtgattcccggtgtagcccgcgtaccagctgtcacgcccatcgttggaggttccggttttgccggcaggggacagccgacccaagccgtcgatgatgagttgccgcgcggtaccgctgttgaccacttcctgtagcgcaacgctgatgacgttggctgcgactgaatcaccgggctgtgcaggtgcaggggtattgtcatagcgtttgagcagtttgttttgcggatcgagtacgccgcgcactgcgtgcaatggttggatttcacccccagaagccaggaactgatagagctgcgtcattgcataagggctttggtcggttgcgcccaggatcagcgatgggttggcgtcggcttttaatccggccagaacgttaatcaattgagccacacgttctgggccgacctgcatgccaacgcgcactgttgcttggttgtaagagtgtgccaatgcatcaatcaagcgcacggttccgtggctgatgttgtcggagttgcttggtgaccaaatacgcccatgtgccagcggtatgctgacgggggtgtcttctacccaactggacaaggaccaacgatccggtgaggccagtgccagtaggtagacgaacggtttcagcagcgaacccacttggcgttgcgcttcaatggcgcgattgaagcccgattgggtggcatcacgactaccgaccacggccaggacgtcgccgttatgtacgtcggtcagtaccagtccggcttgcagtggcggacgtttctggcccttgaccttttccagcgcactgagcgtggtttgtactcctctctcagcataggattgtgccgagggtgacatgccggtaagtacagtcatgcctgcgccacgcaacacattctctgggtaatcgtgagcaagctggcggcgcaccaggtcgaggtacgcgacgaagcggttggctgcaaccaggccaggttctttggggacacctagggacgatgcttgggcgcgcatgtattcagcatcgtcgatcagtttgttttcatgcagtttgccaagcacgaaattgcgtcgggacaatgcgcgatcagggaaacggcgtggatcgtagtacgaaggtcctttgaccaggccgatgagcagggcgacctgttcagtagtgagcgagcctaactcacgtccataccagaactccgcgccagttgcgacaccatgtacggcctggctgccacgttgacccaggtagacttgattgagataggactccaggataacgcgcttggagtagcgtgcctccaggatcagtgcatacaggatttcgttgcatttgcgctgcaacgtctgttctttgccgataccaagcagtccgctacgcgccagctgttgcgttagggtactggcaccttggcgaacgccaccgcctgaacgcaccatcacccaggctgcgcgcaaaatgctggtgatgtcgatgccgtggtgatgtttgaaatcgcggtcttccaccacttgtaagccggtgacgagcagttggggaacttcctccaacctgaccaaacggcgttcttcctgcttctggccgtacagtgtggcgatgcgtgctggatccagtcgcccgcgcctgattggtttacgtgtatctgcgttccgcagtgcagacacttggttgttgttcagcgtgatgatcagacggcttgctggtattgcaccatccacatcaacgtagccacggctggagacagtgaagcggccattttgttgttggtaagtgcctggtaactcgccgtgattgtcctcacgataggacgcggcatccagttcgatcttcaacgtgcgcgcatctaatgccatgcccggttgtagcatcaaagggcgggcatagacccgggttgggatctgccagcgcagctcaccaaagcgagcggtcacctgctgattcaggtaaagcgtgtaagggatcagaaagcccatggcaagcgccaagcctgccaagccacaagcgatcagccagccccaccagggggaatggcccgacatgttgccatttgccgcttcgttgaaatcatcttctgcgtggtatgccacgggtatgtgagaattaggactttatggagtctagcgcaacacctacatgtctgttgactctgtctcacgtaagcatgatcggattccgtttattcgttttctcggtgtttatttattgtttcaatggcgacgccagtgcgcgcggttacatcgtgctcgtattgcgttgtattcccgccgttttgggcagtggatccggttgcgtgctgctgtttctgctgaccagtcagcaccgcccagtgtcgctgctgttgtgtccgccagcgcgacgcagacccccaccaatacccgctgtattttgctcattgatactgtgcccccgcgtccagaccgcgattcaggctcattgcgctgccatcatttaatgcatttgatggtttgcatgggctataaagtggtgctgcactgccaggaacgcatgccaagcgctgcggaggtcatggcattacgtgcgatcggcgttacaaccaccgccgttgcgggtggcttcccatcctggctcctgaccaacccagaacgttattgtgctgttgtagtttgtcgttaccaccttggcctgtcttggttgcccttactacgcgccttcgtgcctgacagcctttgcatcttggatacagtcgatttacaccacctgcgtgagcaacgcgaagccgagttacgcaatctgagtggcttgcgtgctgctgcggccatcacgcgccgccatgaattgcatgcgatcagttgcgctgatctggtgtgggtggtgagtcctgttgaacgtgactatttggccagattgctgccgcaggcgcgtgttgaggtggtaccgaacatgcatgacatggtcgagacgattcctccgttcgtgtcccggcatggttttctgttcgtcggggggagtcgtcatccacccaatgtggatgcagttcgctggctgctgtctgagattttcccacgcatccgtgaacggctacctgatgcacagttgcacttggtgggtgccggactggctgaagcgatgcagagtcagcagatgatatgtcccggagtcagtttccacggtcatgtgccagagatggcgcctttactccacgcctgccgagtcagccttgctccgctgcgctttggtgccggtgtcaaaggtaagatcagtgaggcgttggcctacggtctccccgtggtgacgacacctgagggagccgaaggcatgtacttgcgctccggtatggatgccttaatcagcggcgatgccgaagacttggccagacaggcggtgtgtgcgcatgaagatctggaggtgtggcaacgcctctcagacaatgggcaacagatcatcaagcagcacttctcgctgcacagtacgcgtgctgctctggcggtcatgcttccccattgaaggattactttagagtcatttatgtcactgtctcggattaccgcgttgattgctcgccatgatcgtctcaagcgtctgatggtgcgcttgctctcttgcgttccagcggtggatgtttggcttaggcatcatgtgagtgcgcgaaagtatcgccgttccttgctcgacgtcggtgaggcggatttgcctgaggtggccgtatcggtctaccaacagttgctgattgcaacaggcaaggatggtcgtttgtgaaattggtcatcgatttgcttggcgcgcagacgcgtagccatttgcgtggtatcggccgttatacccgtgaactgacaaaggcactgctgcgccaagcgggcgaggcgcacgcgattcacctcgttctgcatgcgccgttggagcaagccagtgatgcattaattgcagaatttggtgccttgttgccgcgtgcgcgcatccatttgttgcgcctgccgcgccacacctccgaacatctgactggcaatacgtggcgtcatcatgcagcgtcgcgtttgagccgctatggtctgacctgcttggatgcagatgtggtgtggcatagcagtgtatttgaggggtatgacgaagatggggtactgccagatgcacccctgtttcatacaaaccgtgttgccactctctacgatctaattccgttgcatgatccggaagtattcttgccgggatccctgcccaaggcgtggtatgagcggcgcagcgctttcctgtccagttgcgatttactcttctgcctttctgaatggactgcacaagaggcggtacagcggctgcaccttgatccggaacgtcttgttgtcatcggtgggggtgttgattcaaatttccgtccactggtgttcgatgcgcagcaacgcgggaacttactcgcgcgtttttcgatcacccgtccttatgtgctgtacaacggtggtttagatcagcgcaaaaatgtccctgcgttgctgcgtgcttttgcgctgctgcccatggccatacggcaacgccaccagttggttgtgctgggtgatgatcgtgaggtacaccgacccatgatggcattgtgtcgccagctggggttggaccagcaggaagtggtgtttaccggccgtgtcaacgatagcgatttggtcgccctctatgggctgtgtgcgttgttcgtgttcccatcgcgtttggaaggtttcgggcttcccgtgttggaggcgatggcctgtggcgcacccacattgtgcagtgatgcggctagcttgccagaggtcgcggggcgtcaggacatcctgtttccacctgaagatcatgttgccttgagtgctcgcatgtcccaggtgcttgatgatccacagtggttacagtcgctgcgtgattatggtttgcgccgtgctacagcattcacttgggatcgcgtggcgcaacgtgcgctggacgcattgacacgattgcaagtgcgatcttccgaaatgaagtcgcagcgtgtgagtgaggtctcccccgcgacacacaccgagacagcggcccccgaaatgttgccgatcacggagattcaactggtgactgatctggctgcactgcccggtgatgcgtcacgcgacgatctggctcaggccgcgttttcaatctgctcaatgcgcgttgccccgcaggcgccacaatggttagtcgatgtcagtcagattgcaaagactgatatcggtaccggcacgtcccgtgtgacccgcagcattttgcgtgaatggttgagtacgccgccgccgggagtgtgcatcgtcccggtctatttacgtgaaggacagtaccactatgcacggagtttcacggcacaggtccttggcctcgtgtcagagacgccgcaggaagggattgtgatggtgtatcccggtgatgtcttcgttggcctggattgggcaccggaggcgatcaacgccgcccgtgcccgcttgcaggattggcgccgggttggagtggcgacctgcttcgtggtgcacgacttgttgccaatgacgttgcctgattgcttccatccatactcgcgcaatctgttcgaacaatggctccgcaccgttgctcatctggccgatgcgatcgcctgtatttccgccaccactgccgaagtactctccagatggttgcaggacacaacggtggattaccagtttggtatcccgccacaagtgaagcatttcccacttggtgtcagctttcccgaagtgtctaccgcacaggaagcgatccgcgaagaactccgtacagccttggtgatgcgtcctactctgttgatcgtcggcacgttggagccacgcaaaggccatgtccacgccttacgaatttgtgaacaactttgggagcagggcgaagatgtgaatttggtggtggtgggccagcgtgggtggtccgagcaggccttggtcatgcggctgacccgacatcccgaggtaggccgtcggctgttctggctcagcgatgccgccgatgccgagttgtcggcactgtacgtccatgctaccgccctcttagcactctccgaaggtgaaggttacggattaccgttgttagaggcagcccattttaggctgcccattctggccagaccactgccagtattcctcgaaatcatggctgattacccccactaccttgatggcactgctccggatacctggtcggcgacagtggcgcagtggcttcatgcctctgacagacccatctccagacccgtgcctattgcttcctggaaggaaagcgctcaacaactggcggatatcgtgaacgattgccgctttttgcttgattccaagaaactgtccgctcccctcaaataatcagtacatcccccccaaattccccccattccccccattccccccattcccccgattctggccgtctttcagatttttctgacattcacatccggcacattcctcccttccgtcttcaccttcttcccctaccgcccctgataaaatgtgacaaaaatcacccattaatgcggcgcccaccccacaccaagcgattcgggatgcccctcacctaaaggaaacctcatgaacaaggacctgtaccgcctcatctacaaccgtgccctgcgtttgtggcaagtggcctcagaacgagccaccgcccccggcggtaccccaggtccttccactacagcacaacggccagcgcgtgcctgcctccatcccatcccctttgccctgtggctcagcctcggctgggtgagcattgcgggcattgccaccgcccaagtcatcgccgacccccacgccccaggccaccaacgcccgaccgtccttgccacccccaacggcacccccctcatccacatccagacccccagccaggcgggcgtctcccgtaacacctaccaacaatttgacatcaccccacaaggcgccatcctcaacaacgcccgcaccccggcccagacccacctggcgggcaccgtccaaggcaacccctggctggccaccggcaccgccaaaatcatcctcaacgaagtcaacagccggagtcccagccaactgcatggctatctggaagtggctggcgaccgcgcccaactcatcattgccaacccctccggcatcacctgcaacggctgcggcgtcatcaatgccagccagttcaccctcaccaccggcacccccgtctttaacgcccgcggtgccctagaccactaccgcgtccacggcggcgccattcaactcgacggcctgggcctggacagccgcagcgccgactacaccgccctgattgcccgcaccgtccaactcaacgccggcctctgggcccaaaaacttcaggccaccaccggccctgccaccgtcaccccggacggacaccccaccgcctccctgcctgccaccccaggcgaccgccccaccgtggccctggacgtctccgccctgggcggcatgtatgccggcaaaatcaccctgattggcaccgaacacggcctgggcgtccgcaacgccggccaacttagcgccaccagcgcccccctcaccgtcaccgtggatggtcttctagagaacaccggccgcctccaatccgccaccgacactcaactcaccgccaccgcagcagtgaacaacagcggccttatcagcgccgcccagaccctgagcctgcacacccccaccaccattgacaaccgcagcggcaccctcaccgccgcccgcctggacatcaccggcgcccgcctggataaccggggcggccacatccaacaaaccggcctccaacccctgaccctccagacccaacacctggacaaccaggcccaaggccgcctcggcgctttggagaccccggcatccggccaagcctccccagcggacccgacccccgttgccagcgtccctcccgctaccgacacacctcccagcaccggcacgatgcccatcccctcccatccccagacagcgcctgtgctggctgccggtcgcctcaccctagaaaacgacattgacaaccgcggcggccacatcaccgccggcggtgccatcgacgccatcctcaccaccctagacaaccgcgacggcaccgccgccctcaaccgcctcaccctccaaggccaacgcctggataaccaacacggcatcctcaccctcgccaccgaggccaccattcacacccacaccctcaacaacgccgccggccaactccacgtcaacggcaccctggacctcaccgcccaacacctcaacaacgccagcggccacctcctcaccaccggcccccagagcgccaccctcaccattgccgacctcctcgacaacaccagcggcaccctcgccagcgccggttccctgaccctcaccgccgccaccctcgacaccaccgacggcaccgtccaaagcgggcaggggcccctgcacatggatgccgccaccctcaccgcccaccgcggcaccctgaccagccaagacaccctcaccctcactggcacccacaccgacctcagccacgccaccaccaccgcccaacagatcaccctccacacaggggacctcaccaccgccggcggccacctcaccgcctacggaacacacaccctccaactggaggcccgtacccgcctcgacaacaccggcggcaccattgccaccaacggcaccctggacctgcacaccgccgccctggataacaccggcggcaccctccacagcaccgccaccggccccaaccgcctggacatcaccgacaccctcaccaacaccgccggccacctcctgctcaacggccccaccaccctcaccaccggcacctggaccaacacgggcggccacctccagatcaccggccccgccaccctccacgccaccaccctggacaaccgcggcggcatcctccacaccgccaccggccccctggacctgcgcatcaccggcaccctcaacaaccaagacaacggcctgctcaccaccaccgacgccctcaccctgaccgccgccagcctcctgaaccaacacggcaccctggatgccgccggaccggcccacctcaccctcaccggcctgctggacaacaccgccggcctcctccaaaccgcccacaccctctggctcaccagcgccggcctcaccaaccgcagcggcaccttgacggcttctcagctcaccctggacacccaaggtcacaccctggacaacacccgcggccgcctcggcaccaccaccggcaacctcaccctccacagcggccccctcgacaacaccgccggcctcctccaaaccgccgccgccctcaccatcgacaccggcgccgccaccctcaccaaccgcgacggcggcgccctcctggctgccaccgccctcgacctcaccaccgccaccctcgacaaccgcggcggcaccatcgactcccagaccgccacccacctccacaccaccaccctcgacaacaccaccgccggacacatcagcagcagcggcaccctccagattgacggcaccaccctcaccaacaccggcggccgcctctacagcggcggcgacacccgcctccacctccaagacaccctgaacaaccacgacggccgcatcaccgccgccggcaccctcgacatcgccaccaccaccctggacaaccacagcacccccatgaccgcaccccccgttgcggcgacccgtgacacccccagcgacaccaccgcccccacagacaacggcctctacgccacccacatccagatcgccagcaccaccctggacaacaccgccgcccacctcagcgccgctcaaaacctcaccctcaccctgagcgacaccctcaccaacaccgccggcaccctcagcgccggcggcaccctcgacctcactgccgcctacctcagcaaccacaccggcaccctcctcagcggcgccacccaaacactgaccctccaccgcctcaccggcgacggccgcctccatgccggcaacgccctcaccctgaccctccaagacagcctcgacaccgccggcatcctcagcgccaccggcctactcaccctcaccaccgccggcgacatcaccaaccgcggcctcctccacgccgccgacctcaccgcccaagcccgtgacatcaccaccaccgccaccggccaactcctggccaccggccacacccacctcaccgccaccggcaccttgaccaacagcggcctgctccaagctgccgacctcaccgcccaggcccgtgacatcaccaccaccgccaccggccaactcctggccaccggccacacccacctcaccgccaccggcaccctgaccaaccgcggccacctccaagccgccgacctcaccgcccaggccaacaccatcaccaccaccggcaccttcctggctaccagccacgccaccctcaccgccgccgacaccctgaccaacagcggcttgctccaagcccctgacctgaccgcccaagccaacaccattaccaacaccgccaccggccaactcctcaccaccggccacgcccagctcaccgctaccgacaccctcaccaacagcggcctcgtgcacgccggtgacctcaccgtccacgcccgtgacatcaccaacaccgccaccggccaactcatcgccaacaccctcgcccaactcaccgccaccgccaccctcaccaaccgcggcctcatcgacgccttcaccacccacctcagcgcccccaccattgacaaccttggcaccggccgcctctacggcgaccacattgccctccacgcccagacccttaccaaccgcgatgaaaccagcgacggccacacccacgccgccaccatcgccgcccgccaacgcctagacattggtgctgacaccctgcgtaacaccgccaacgccatgattctcagtgatggagatgccgccatcggcgccaccctggacaacgccctccacgccaccggcaccgccaccctcctggacaaccgcagcgccaccatcgacatcaccggcaccctgaacatcaccaccaccaccctcaacaacatccgcgacaacgtccacatcgcccacgcccccgacgtcgtgaccgaagcccgcatggaacaaccccactggcgcaaaaaccaacccaacggcggctcaggcaacttccgattcaccagcaactacgacgcccacgacatctattacctcaaccccgccgacatcatcaaagacgacccctacatcacccccgatggccaacagatccaccgcgccatcgtccgcctcaccccccagaccagcgcctacttctatgcccgtggcggcctctatgccagccaagccgaacgccgccgcatggacctcaccgcccgcaccggcgacagcgtcgtcctctactacaccgaccgtcaggacaaacaacccaaccccgaccacgttgccgccgccgcgaccaaccacagcgccttcatcggcctggacaccccccagcaaaacgaacgcttccaaaccgtccccatcacctacgcccctggcgatgaccgcctcacctacgactccaactacggcacctgcaccgacgactgcgtccgcctcgtcacctggcacgactacaccgacccagaccacaccctcattgacatgcaccgcggccccaacgatgtccgcgacaacgagaaataccgcgatgccaccagaaccacccaacaagacattctcaaccccgatgccggcgcccccgccctcatccagaccggcggcgccatgatgattcagaccgacaccctgcgtaaccactacgccgacctcctcgccggcggcgaccaaaccatcgttggcctgcccccccatccgacgaaagaaaaatcagatgacgaacacaagtacaaaagagtcctgctgatcgacaaccgcgccctccaactctcccgcaccgacaccttccacaacatcagcaccacctaccgtggcaaagtctccgaaccatggagcaatgaatcccgcaccacccccaccacacagattggcggccgcatcaccagcggcggccaccaacacattgccgcccaaacactcaacaacgtcaccgactccacccacgcccccgagccgatccaacatctcacctacaaccccagcacccaaaccttgagtgtcgtcaacggcgtcatcaccgtcaccgacacctcccccagcctccacaccgtctcccttgccgacaacggccccagcgccggccaagaactcacctacatccctgaccagagcatcaccacccccaacgcccccatccgcgaccccgccgccccccccgccgtcaccgtcacccccaccggccccctcaccctgcccaacaacagcctcttcacccttcaccccgacgccgccaccctcatcaccaccgacccccgctttaccctcggccgcccctacaccagcgccgacacccaactccacgccctcggcgaccacgacaccctccacaaacgcctcggcgacggctactacgaacaacgcctcatccgcgaacaacttgcccaactcaccggccgccgccgcctggacggctacaccgacgacgaccagcaataccgcgccctcctggacgccggcgtcaccgtcgccaaacagcaccaactgcgccccggcattgccctcagtgccgaccaactcgcccaactcaccagcgatatcgtctggctcgtccaacaagacgtccaactgcccgacggcaccaccacccgcgccctcgtcccccgcctctacctgcgcccccgcaccggcgacctcaccccagacggcgccctcctggcggccgccagcaccaccatcaacgcccacaccttcaccaacaccggcaccattgacgcccgccacctcatcgacatcaacgcccacaccatggaccaacaaggcggccgcctcaccgccgacgccatccacatccacaccaccggcgacttcaccaccctcggcggacaattcaaagcccgcggctacctcaaagtccatgcccaaggcaacttccttgctagcagcaccctgcgcgacgccaccacccaaggcacccgccaccacagcgtgacggaactggaccaacaggccggcttcaccgtcaccggccccggcgcttacctgggcttaagcaccgaccaagccatgacccacaacggcgttgccatcaacaacaccggcacggacggctacacctccctcaacgccaccggccccctacacctgggcaccctcaccacccaccgcagcgacaccacccagtgggacccccgcaacagccgccacagccgcatcgacaccgaatacggcaccagcatcaccggcaacggcgacatccgcatcagcgccgatgccggcatcaccggccgtgccgtgaccctggacagcagcgccggtgacctgacgctgacctccagacacggcagcgtgaccctccaggccggagaagcgcgcctcagtcaccaacaagagcgcaccagccgccgcagcggcctgctccgttccagcagcagccacagcaccgccagcagtaccgataccgtcgccctctccagtgtcctgggcggcaagaacatcaccatcaccgccggcgacaccgtccacagcgtcggcacccagttcattgctgatcaagacatcgacatcttcggcaccaagggtgtgcgcctggagaatgccgaaaccacccacagctcccagtacgccatccaacagcgtaacagcggcctctcccgcgctggcctcggcatcagcatcggctccagccgctccagtgaacaaggccacacccaggccacctccagcgttgccaatacggtggctgcactccatggcaacatcaccatccactccagccaaggcaacgtcgatgctgccggtagcgaactgcttgccgccggcaacctcaacgccagcggcgtcaacgtcgacctgggcgaggtctacgacaccctcagcacccacgaacagcaagccagcacacacagcggcctgagcatcggcttcaacagcgccctgaccagcaccgctcagggcgtctcggctgacctgaacaaccgccgcaacgcctccaccggacggctgagcagcctctacggctggcgtgccctgagcaccgccgccagcgccggctatcaggcctatggcgaaatcgacaccctgcgcaagaccagcagcctgccgagcacctttcaaatcggtgtctctgtcggcaccagcagcagccaaagccaaagcagcatgaccacccacaccgcccgcggcacccaattacgcgccggtggtggcatctccgtcaccgcctttggtgtttacgaacccgacgacacaggcaagcccacactcaaagcaggcaccggcaccatcaacgccaccgctgcccagttcagcagcactaacctcaccctgatcgccgctggcaacctggacgcccacagcgcccagagcacccaagaacagacctccagccagcgccaccgcagcgccagcctgggcgccaagatcggggtgaccggcggcggccccagcgttagcgccgatgtggcccgcggccgcggctcctcccgccagcagtccgtgacccaagtcgataccgtctttactgtggccaatcacgccaccatccgcgttggcggcgatgccaccctgaaggggagccacctcaacgcccactccattcaagccaccattggcggcaacctggacatcaccagcctgcaagacaccctgcaggccagcgcccagcaacgccagagcagcctcggcggcacctgggtcatcaacggcgccggcagcaccgccaccctcagccgcaaccgccaagacgccacccaggattacgccagcgtccgcaaccaaagcggactgtttgccggggccggtggctatgacatcaccgtcggtggccatagccaatttaacggtggcgccctcaccagcaccgccccgcaggcactccaatccttctccaccaccaccattggccataccgatatccacaaccacaacagcgccaccgccagcgcctctggcatcaccctgggcagtgaccttgtcagcggcctgaacaaaaacaaccccaacggcaaacccaacattggtttatcgatctacagcggcctcagaagcggcgccggccaatggatggccaatgccgaccgcagcgttaaccaacacagcaccaccgccgccgtggtcagcgctacaaacatccaggtcagtgaccctggcagcagcggcgccctggccaccctgcgccgtgaccccatcggcgcccaccaggccttgacccccaccgacctgggcgccttgcaaaccgatgtccagcagcgcagtcagggcggcgccctgctggctgacatcggccgcatcatggcggaccagagcatcagcaacatgctcacccccacactcaacgaagtgttctgcatccaacaaccctgcaccaacgaccataccgccaacgatgcccgggtgacagaacgcacccaagcactgcgccaggcccatccggactggtcggatcgcaaactccgcgaacacgccgttgcagaactcgcgctcaccgaccacaacgccaaccgcgtgctggatcaagacaaggtcaaggagatgattgccaacaaaggcgagggccagtacagcctgcaagacgacctgctggcctctgggcgttggggcatcagccgcggcagcggcaatatccaactcctgccggtgagcctggccgacctcagccgcttatcggatgaggagaagaaacacgtcactatcttcggcaacggcatcagcaacgccagggggcgcgccggggaactggccttgcagatgacgccgaagaatgaggatagggaaaagattcgggagagcggtgaaacctaccaaaacaccacctacctgccatataccaaacccacccaccagctgggggaactggtgaccgccggcattgagaaactcctggaaatcaccaaggtccccagccccgcctcgcggcttcaggccgcggcggccaaagaggtgatgtataacgcctcgaaagataattactccaacccggtgtatctggagggccatagccgcggcaccatgacgctcagcaatgcgctgcgggtgctcgccgcggatcatgtgttgagtgacgatcttagaatattggctttcaaccctgccgcggaaggcaaccgccttgctgaagccgctgccctggtgacgaaaattccagtcaagacctggaagccgcatgatgacttttcaagacctggaagccgcatgatgactttgtggccaacaagattggcggctatgacggcgatgccaccttccatgatctgtggaagatcttccaaaccaactactccgtgcacagcagcggtggcaccgcggccctgggcagcgactggaaccatgtcgataaagagaaactgttcagctataaagacctggatatcaacgatatgaacgccaagcgtcaggggcggaccatcgggctgctggagcaatggcagaagatgcggcgtcccgaggacccggtggcgacccaactcacccagtggcaacgcctgctgtggcaatcccagcagtggcaacagcagctggacaccaccccggggctgctgacacggcccaccccgacctccccggacgcccccagcgcccggcaacagcagctccaacagttgcgccagtccctcaccccacattaaggagccttctccatgcaacgacgtcccttacttggtgtatccctgctggccgccagcctcttgctggctggctgcagcagcgccccccccatcgacagccgtaccggaaaaccgatgatggccggcccctgggagaaccgcgacctcagcctggaagacttcaatctggattttttaggccaatacaccgtcaaacatgcctttatcaatggcatcaatatcgaccgctgttacccaggcgcgccgcctgaccacgtgcaggtggtgatgatgtctttccgtgatggctccagtagtccggggattgtgaaagagatcgctaatcgtccaccgcaaccgtatagcaagtccgccgcatttatcggctcccagtactccaataccagcaacaaataccagcccgatggccggaccgtgctacgcaaccccgatggcaccccgcaaaagaaggtggtgaaaggctggacatttagttcattgtgtaaggcggagtttgcggggggcaatgacatctactttggcatccgcagtgctgctagccaaagtattgaggagaagattcagggcacatcttctcgggtcagtggtcccgatcggcattttaaggacagtcgttttttagataccccacggaccgagacacgctggggcaacacctggacctggtaccgcgccttgatcccaaccccggtgggggatggcgtagaaatgtggatgaccccgattggcgacagcggctactacatcacggtgactttcaattttattgaagcggcccgccaacaaaacaccgaggattaccaacgcgcccgtcagctaatggacggcatcctgcaatcggtggtgatccagaagcagtgagcctcacgcccgttggggtgacgcagagaacccggtggccacccagctcacccaactgcaacgcctgctgtggcaatcgggccagtggcaacagcagttggacaccacccccgggcggctgacgcggcccacgccgacctccccggacgcccccagcggccggcaacagcagctccagcagttgcgccagtccctcaccccacattaaggagccttctccatgcaacgacgtcccttacttggtgtatccctgctcgccgccagcctcttgctggctgggtgcagcagcggccccccatcgacagtcgcaccggtaaaccgatgatggccggcccctgggagaaccgtgacctcagcctggaagacttccagctggattttttcggccaatacaccgtcaaacacgcctttatcaatggcatcaatattggccgctgttacccaggttccccgcctgaccatgtgcaagtggtgatgatgaccactcccactggcttcacgactccggggattgtggtaacaggtggaggacgtcctccacgccccgccagtgaacatgccgcatttatcggctcccagtactccaataccagcaacaaataccagcccgatggccggaccgtgctacgcaaccccgatggcaccccgcaaaagaaggtggtgaaaggctggacatttagttcattgtgtaaggcggagtttgcggggggcaatgacatctactttggcatccgcagtgctgctagcgaaagtatcgacagccatattaaagatatgatctggcggatgactgcccccgatcgggattacaagtccaaccgttttatagacgccccgcgcaccgagacgcgctggggcaacccctggacctggtatcgcgcctatatgccaaccccggtgggtgatggcgtagaaatctggatgaccccgattggcaacaccggctactacatcacggtgactttcaattttattgaagcggcccgccaaaaaaacaccgaagactaccagcgcgcccgtcagctgatggacggcatcctgcaatcggtggtgatccagaagcagtgagcctcacgcccgttggggtgacgcagagaacccggtggccacccagctcacccaactgcaacgcctgctgtggcaatcgggccagtggcaacagcagttggacaccacccccgggcggctgacgcggcccacgccgacctccccggacgcccccagcgcccggcaacagcagctccagcagttgcgccagtccctcaccccacattaaggagccttctccatgcaacgacgtcccttacttggtgtatccctgctggccgccagcctcttgctggctgggtgcagcagcgccccccccatcgactaccgcaccggaaaaccgatgatggctggcccctgggagaaccgcgacctcagcctggaagactttcaactggattttttaggccaatacaccgttaaacatgcctttatcaatggcatcaatatcgaccgctgctacccaggcgcgccgcctgaccatgtgcaggtagtgatgatgaccactcccactggcttcacgactcctgggattgtgaaagagatcgctaatcgtccgcctcagccgtatagccagtctgacgcattcatcggctacgagaaatccaataccagcaacaaataccagcccgatggccgcaccgtgctacgcaaccccgatggcactccgcaaaagaaggtggataaatggtggaggtttaatccactgtgcagtgcggagtttgcggggggcaatgacatccacttcagcatccgcagtgctgccagcgaaagtatcgacagccatatcaaagatagggttgcatggatcagtgctcctgatcgggattacaaatccaaccgttttatagacgccccacgcaccgagacgcgctggggcaacccctggacctggtaccgcgcctatatgccaaccccggtgggtgatggtgtagaaatgtggatgaccccgattggcaacaccggctactacatcacggtgtatctcaactttattgaagccgcccgccaaaaaaacaccgaagattaccaacgcgcccgtcagctgatggacggcatcctgcaatcggtggtgatccagaagcagtgagcctcacgcccgttgaggtgccgccgcagcgctgcggcaccctgacgctcagcaatgcactgcggcaatgccaccttcaatgatttgtggaagatcttccaaaccaacgactccgtgcacagcagcggcggcaccgccgccctgggcagcgactggaaccatgtcgataaagagaaactgttcagctataaagacctggatatcaacgacatgaacaaaaagcgtcaggggcggaccatcgggctgctggagcaatggcagaagacgcggcgtcccgaggacccggtagccacccagctcacccaactgcaacgcctgctgtggcaatcccaacagtggcaacagcagctggacaccgccccgggggggctgacacggcccaccccggcatccccggacgcccccagcgcccggcaacagcagctccagcagttgcgccagtccctcaccccctactaaggagatcccctcatgtccctgcgtccgcgactcgcttgctccctgctcgccgtcagcctcttgctggccggctgcagcagcggcccccccatcgactaccgcaccggaaaaccgatgatggctggcccctgggagaaccgcgacctcagcctggaagactttcaactggattttttaggccaatacaccgttaaacatgcctttatcaatggcatcaatatcgaccgctgttacccaggctccccgcctgaccatgtgcaggtggtgatgatgaccactcccactggcttcacgactccggggattgtggcgacgttccctaatcgtccgcctcagccgtatagcgagtctgacgcattcatcggctacgagaaatccaataccagcaacaaatacgatcccgatagccggaccgtgctacgcaaccccgatggcaccccgcaacagaaggtggataaatggtggaagtttaatccactgtgtaaggcggagtttgcgggcggtaacggcatctactttggcatccgcagcgctgccagcgaaagcattgagacatatctgcaaaaaaccattgagttggttagtgcgcctgatcgcgattacaagtctcaccgttttatagaggctccacggaccgagacgcgctggggcaatccctggacctggttcagtgcatatctcccctcgccggtgggcgatggcatggaaatctggatgaccccgattggcgacacagggtattacatcagagtgcatttgaactttagcgaggccacccgccaacaaaacaccgaagattaccaacgcgcccgtcagctgatggacggcatcctgcaatcggtggtgatccagaagcagtgagcctcacgcccgttggggtgacgcagagaacccggtggccacccagctcacccaactgcaacgcctgctgtggcaatcgggccagtggcaacagcagttggacaccacccccgggcggctgacgcggcccacgccgacctccccggacgcccccagcgcccggcaacagcagctccagcagttgcgccagtccctcaccccctactaaggagaccccgtcatgtccttgcgtccgcgactcagttcctccctactcgccgccagcctattgctggccggctgcagcagcggcccccccatcgacagccgcaccggtaaacccatgatggctggcccctgggagaaccgcgacctcagcctggaagacttccagctggattttttaggccaatacaccgttaaacatgcctttatcaatggcatcaatattggccgctgttacccaggctccccgcctgaccatgtacaggtggtgatggtgacgtcccccagtggctccaagactccggggattgtggcagatggcggcggtaaacggccccctgaagcatggccaatgcgggcatacttcatcggctcccaatattccaataccagcaacaaatacgatcccgatagccggaccgtgctacgcaaccccgatggcaccccgcaacagaaggtggtgaaaggctggacatttaatgccttgtgcagcgcggagtttgcgggggggaattacattggctttggcatccgcagtgctgctagcgaaagcatcgacagccatattaaagatagggttgcgtgggtcagtgcccccgatcgggattacaagtccaaccgttttatagataccccacgcaccgagacacgctggggcaactcctggacctggtaccgcgcctatatgccaaccccggtgggtgatggtgtagaaatctggatgaccccgattggcaacagcggctactacatcaccgtgaccttcaactttattgaagcggcccgccaacacaacaccgaagattaccaacgcgcccgtcagctgatggacggcatcctgcaatcggtggtgatccaaaagcagtgagcctcacgcccgttggggtgacgcagagaacccggtagccacccagctcacccaactgcaacgcctgctgtggcaatcgggccagtggcaacagcagttggacaccacccccgggcggctgacgcggcccacgccgacctccccggacgcccccagcgcccggcaacagcagctccagcagttgcgccagtccctcaccccacattaaggagccttctccatgcaacgacgtcccttacttggtgtatccctgttggccgccagcctcttgctggccggctgcagcagcggcccccccatcgactaccgcaccggtaaaccgatgatggccggcccctgggagaaccgcgacctcagcctggagtacttccagctggattttttaggccaatacaccgttaaacatgcctttatcaatggcatcaatatcgaccgctgctacccaggctccccgcctgaccatgtgcaggtggtgatggtgacgtcccccagtggctccaagactccggggattgtggcagatggccgtgttaaccagccccctgaagcatggccaatgcgggcatacttcatcggctcccagtactccaataccagcaacaaataccagcccgatggccggaccgtgctacgcaaccccgatggcaccccgcaaaaacaggtggtgaaaggctggacatttagttcattgtgtaaggcggagtttgcgggcggtaacggcatctacttcagcatccgcagtgccgccagcgaaagtatcgacagccatattaaagatatgatccggcggatgactgcccccgatcgggattacaagtccaaccgttttatagacgccccacgcaccgagacgcgctggggcaacccctggacctggtaccgcgccttgatcccaaccccggtgggtgatggcgtagaaatgtggatgaccccgattggcaacactggctactacatcaccgtgaccttcaactttattgaagcggcccgccaacacaacaccgaagattaccaacgcgcccgtcagctgatggacggcatcctgcaatcggtggtgatccaaaagcagtgacgggctgggcgatcccctggaggcggctcatcactcaagtcatgaaccgcctgtatattcaggacagcggcgaaacctaccgcaacaccacctacctggcgtataccaaacccacccaccagctgggggaactggtgaccgccggcattgagaaactgctggaaatcaccaaaatcgccagccccgcctcgcggcttcaggccgcggcggccaaagaggtgatgtataacgccgagcaaggtaattactccaacccggtgtatctggagggccacagccgcggcaccatgacgctcagcaatgcgctgcgactactcgccgcggatcatctgttgagtgacgatcttaaaatattggctttcaatcctgcggcggaaggcaaccgtcttacagaggccactctcagggtgacgggcgaaaaaccctacatctgggcgccgcctaaggactttgtcgccaacaagattggcggctatgccggcaatgccaccttcaatgatttgtggaagatcttccaaaccaactactccgtgcacagcagcggcggcactgcggcccagttcagcagccacactctgaacctcaccgccgctggcaacctggacgcccacagcgcccagagcacccaagaacagacctccagccagcgccaccgcagcgccagcctgggcaccaagataggggtgaccggcggcggccccagcgtcagcgccgatgtggccagcggccgcggcagtgcgggccgtgattccgctgaggggcagtgctacttgaggggtgctgaagtaggcaatcaaacactgcacggttgtcggttatcgtgagttgagaggggcggaaatcgtttgcagtaatcgtctgaagcaacgggtggttgatggtcagatatctgaagcgctgcccgaggtgtcgggcagcgataaggggggctgagggattgtgaaggccgagcaggagtcgggtttgatgggggctgtgcaggggtttgctcagtcggaagcgttgtagggtagggcaaaggttgcggtttgtttgtcccgccagacgttctgggaggggacggtgtcgttttaaggttgtttgggttgtggatggttatcacagcccttggttgagcgggcagtgatgagttgggtgcggcgttctttggctgttttgatcgcctgattccgttcgagggtgttgccgatgccgaaatcccccaagaagctggcaactgacatgccactgaattttgcttgttctgtgacttgttgttcgaaagcgtcaatctttgctagttctaagtcgatttgggtgcagttgtagttacggctctcgtagctggtcaacggttgtagtcttccatatcgctttgtggcgcagcctgagagtagtgttgctgttgtaacagcgagtagggcgatgacataggtgtttttcattgtctactcctctccttgttgatgagtttttttcgacttcgtgccccacttgtgatgttgttgtttggcgcagtcttcagtgtgcctttcggtaatgtcgtttttgattgttttatgtcgttgtgtggcgcagcctgagagtagcgttgctgttgtaacagcgagtagggcgatgacataggtgtttttcattgtgtattcctctccttgatgttgatgagttttttcgacgtcgtcgtgcggtgcttgttgtgttgttgtttgacgaagtcttcagtgtgcctttcggtaacgtcgtttttgatcgttataggtagcagggcactgcgatgaattgtgatgtattgccgtaattatgtgcaaattcattcacgttcattgatggttcggcgtgatgtgttgcagcagtggtttgctgtttaggcacggtaatgtgggcggctccgggctgggagctgagtgcttggggtatttgcggtcttgccgtcagtattaatttcagttgttgcgttagccattcatcggtttggggtgatgttgatggatggtgggatggctaaggtgttttttctgtggtttgtttcagagccaatggacgcgtttaaagagtctgtagagcaggatgcagaatagggtgacgccggcggcaaggagtgggtaggcgtagggtatgtggagttcgggcatgttggtgaagttcatgccgtaccagctggtgatgagggtcggtgcggcaagcagggcggcccaggcacctaggcgtttgacggtttcgccttgggcgagggtcaccattgagaggttgacgctgagtgcggtgctcagcatttcgcgtagtgtgtcgatggagtcgttaatgcggatagcatggtcgaggacgtcgcggatgtagatgccgatgtcttggggcaggagtgtttcagcgttgcgtgtgaggtgtgcgaggacgtcttggaggggggcaacgacaagacgcattttgttgagttcgcgtttgagttcgtagaggcggatgacggtttggcgttggtagttttcggaaaaaatgtcttgttcgagttgttcgagtgtgtcccggcattcgttcatgatcggtaggtagttgtcgacgatgaagtcaaggacgccgtagaggcagaatgcggggccgcgtcccagcatggttgggtcgcgttctatccgtgtgcgtactggtgcgtaggagagtgaggcgccgtggcgcacgatgatgaggaagcgggtgctgaggaaggcgtgggtttcgccgtagcagatccgttcgccaatcagttgtgcggtgttgacgacaataaataaggtgttgccgtagttttctactttagggcgttggtgtgctttcaaggcatcttcgatggcgaggtcgtggaggccgaattcttgttggagtttgcgtaatacggttgcgtctggttcgtagagtccgacccagatgaagctgttgtcgcactgtagttcttcgctgatgcggtctaggtggatgtcatggcgctggttttgggggtcgtagtaggcgcaggtgatgacacaggttgggttttcaggagaggggtgttgcgggggctggggtgtggtcatttggggtggtgtgttgcggtggtgaggcggcgatgcagtgtccaggccagggcgaggtgatttggaaggagcaggccgatccacgagaggttgtgttgggtgtaggcggggagccagtaggtgagcagtgcggcgaggctggcggcggcgttgctccataggaggagatcgaaccagcggccgggtgttctgccgcataaccaggccatacccccgacgatcaggagcacgctcagtgggttgaggaggaggaggttgcggttggcccaggcggcctggtgggtggtgaagccccacaggtaggtgaggaggagtccgccgagtgtgcagatcaaccagaatgggagtgccagtagggtcaggcggcgtgggtggtgtggtgcgagtaggagtgtcagtgttgctatgccaaggccaaggagccaccacgtccaggggcgggggagggggtgtggggagggagtgatggggtggtggggtgggatgatctgggtttgttgtactagggggcgtccggcgctgttgtgcacttgggtcaggtgttgggccaggtgcatgggtatgaaggattcttcccagggtgagagtggctggtcggcgtatggacccatcaccaggtccagtccgagccacatccagggggttggcgaggccaggcggatgacttcgctgcggtaggtgttgcggtgtgtgtgttgtgtcagttgtgttttcagtgtgccgcccatcgcctggtccaggctgtcgcgcagcattgtggcgcagttggcagtgatgaggtcgtagtgatagcgggcatactctggctggctgcgaatttccagtgcctgtgcgagtgcgatggcttgttcagggggcaggtccagccattggatggtgatgctgcgcccggtgttgcggtattcgtcgaggtcttcttctaagggaagtgagatgaggtaataaagcatttcgccgcggatgacacgaccgaggaagtcaggttccagggggtcgaagtagccgaagttgtaggagagggattggccgctgattgggtcggcgacgatgattgcatcgtggccgaagtgttcgaagaagagttggccgggctgcattgtggcgatgccaatgcgtgggggatgggcagcggcgctgggtgtcagtagcagccaggtacagaggagtaaggataggacacgcaggaggcggtgcgttggctgtcgagggagtgcggtcaagcggtgttctgttcgttgggaggaagtacggtcacgtggagtatgtggatccggcgtgcattggctttggcgacgcggaatgcgaatcggcctatggtcagttcgtcgccggtttcgggtaggtgcccgatggcttcggtcactaggccgccgatggtgtcgtagtcgtcgtcgggaaattcagcgttgaagcgttcgttgaagtcttcaattggggtcagggcgtcgacgatgtagcagccgtcggcctggatggcaatcatgttggtttggtcttcggtttcgtcgtgttcgtcgtcaatgtcaccgacgatttgttccagtacgtcttcaatcgtgacgagtccagcaacgccgccatattcgtcgacaacaatggccatatggttgtgggagagtcggaattctttgagcaggacgttgagttttttcgattcggggatcatcccaacggggcgcaggagttcgtgtacgttggtgatggtgtggttggcggatacgccacgcagcaggtctttggcgaggaggatgccgaggacttcgtctttattttcgccgtggacagggaagcgtgagtggccggattcaaccatttgttttgtgatggtctgtaggtccgattcaacaggcagtgaaaccatttgggagcgcggtaccatgacgtcgccgacggtgaggtctgcgattgcgatcgctccttccatcatgcgcagggtgtctgtggcgatgagcccgtggtgttcggcgctacgcaggataaccagcaggtcgtcaagggtgtgtgggtctccggagaatgcagcgctcaggcgttcgagccagctgcggcgtttctcttgggattcggtaatggtgcgatgatcgtcgtcttctgacatcaatgaaggtgtggctgcagtacccggtggaccgggcgttgttgcaagtttagcaggctgggtatggggtacgtttttctggaaagtcatggcaggtgttaggggtcgtcgaggctgtaggtacagcccactaaggttttcccagggtgtgaggtaacgttggaaacgttgagtacgatcgattcgatggcgggttggccggtcttggggttggtggtgttagcgctggtcagttcgcgcccgaatatggtttttttgggggtgtcgattgcggtgtgtagttgtagggtgcgtgccagtgggcgtgggtcgggtaggtcaaggatggcgatgatgctgccgcccgatagggcgatatgtttggtttggtggccgaatacgtgaatgggggtatgcagtgtgtattcggtcatgaaggggttggttgccggtagggggtgccaacccagtgtggtggctttgggtgggtcttcaaggagggggacgagttgggcgtagtcgatggtacgttggcggcattcgatcagtgcttccaagttgggaggtgtgagatgggggtgttcggcagccaagcagatgagtgtcggcagtgtcgtaaggagagtggttagagaggcgcgcatcagtattcttcaaggtaggggtcgctgatgccgagattggctaggatctcgcgctcaagttgttccatggcatcggcttcttgatggtcttcgtggttccagccgagtagatgtagggtgccgtgtacggtgaggtgggcgtagtgtgcagagagcgatttgccttgttctgcggcttcgcgtgcgatcactggggcgcacatcacgatgtcgccgagtagagggattttcagggctttaggcaggggttcgggaagttgagcggggaagctgagtacgttggtggcgtagtctttgttgcgatagtggtagttaagtgcgcggccttctttttcgtcgacgatacgaatcgctaggtcggctttgcggatacgtccttgcagtgttgcggcaacccatttgcggaagcttacggcggcgggaagtttggtccggggcaggccatagctgatgccaacattgagaaaaatcgggccgcgtgtcatggcgctgtttttgtgtcggaatgcgggaggtggtgccgcatgatgtggttggatgcagtggaagcgggggtcatgctggtttggtggtgttggaacgtgtgttgtgtttgtcgtaggcactgacgatacgtgcaacgagtgggtggcgtacgacatcgtgtgatttgaagaaggtgaagctgatgccttcaatgtcgtgcagtacttcgatggcgtcgtccaggccggacttgagatgtttggggatgtcgatttgggttaggtcgccggttactacggcggtcgagccaaagccgagacgggtcagaaacattttcatctgttcaatggtggtgttttgcgcttcatccaggatgacaaaggcgttgttgagtgtacgtcctcgcatgtaagccaatggtgcgatttcgatgatgtttttttccagtagtttgaggactttttccacacccagcatttcgtaaagtgcgtcatacagggggcgtaggtaggggtcgattttctggttcaggtcgccgggcagaaaaccgagtttttcgccggcttcgacggctggtctgacgaggatgagacgctgtacacgggattcgttcagtgcttcgactgcactggccacggcgaggaaggttttgccggtaccggcggggccaatgccgaagttgatgtcgtgggtggcgattttgtggaggtatttggtttggttggcgccgtgtccgcgaacggtgccgcgcttgactctgattccgatatcttgaggtgtatcggtctgttcgacgatctgtgccatatgtgcttcactcagacgcagttggatcgtgtggttgttgaaggtggtaccggtggcttcggcgtacagtgcgcggagtagggtttctgtggtggtcacagcgggttcggggccggtaatgtggaatgtgtggccgcggttggcgatctctacgcccaaacgcagttcgatttggcgtaggtgttcgttgaagcagccagagaggtcggccagccgttcggcgttggctggttcaagggtaaagtgacgttgtgcaggtgtattcatggtgtggacgtcgcgaggatggcggcgtcagcaggtgaaggtggaagggtaccgtgtggatgtatccagagccaggatgacggtttgttgggtactccaaggatgtgtcgttgagggtatttccttcatgatgtatggggtgatagatgatgtttggttttggggatgttggttggtgaacgttttgccacgatggttttttcctcacaggtgatgtggattggttttggaaaaagcgctgggtcattactgtaattttttggtgtgtaagtatttttgtgtttgatgaaaaaaatgtcagaagggatgttggcggtcatgttttcgttgtcagttggtatgcacgcggccgcgtaatgagttgctcagtgcttcggtgatgtgtacgtcaataaattgtccgatgaggcgtgggtggccagggaagttgactggccgcatattttcggtttttccggtcagttcgttagggttcttttttgatggtccttccaccagcacggtttgcacggtgccaatcatgcgttttgagatgtcggcggcataggtgttgatgtgcttttgtaggtgttctaggcgggtgcgtttgatttcatcgggtgtgtgatcctcaaggttggaggccggtgtgccggggcggcgggagtagatgaaagagaagctctggtcgaaaccaatgtcttcgatgagctgcatggtcttctggaagtcggtgtcgctttcaccagggaagccgatgatgaagtcggagctgatcgaaatgtccgggcggacggcgcgcagtttgcggattttggatttgaattccagtgcggtgtagccacgtttcatcgctgagaggatacggtcgctgccggattgaacgggaaggtgcaggtggttagccagttgtgggacgtcgcggtaggcttctacgagggaatccgaaaattccagggggtgggaggtggtgaagcggatacgcccgatgctttcgaattgggcgattgcacggatgaggaggccgagatcggcataaggggggggcgcagggttggtgttgttggatgggccagggtccatcgctccgcgataggcgttgacgttttggccgagtagattgatttcacggacgccttgggtcgctaggtgtgctatttcggtcaacacgtcttcaaatgggcggctgacttcttcgccgcgggtgtagggaacgacacaaaatgagcaatatttggagcagccttccataatcgagacgaatgcgcttgggccttcggcacgcggtgtgggaaggtggtcgaatttttcgatttccgggaagcggatgtcgacctgtggtcggttctgttcgcgtcgggcgcggatcatgtctgggaggcgatgcaatgtttgcgggccaaagaccagatcaacgtaaggggcgcgtttgacgattgcctctccttcttgggaggcaacgcaacccccgacgccgatgatgacatctctgccactggttttcagtgctctccagcgtccgagttggctgaatactttttcttgggccttttcgcggattgaacaggtgttgatgaggataatatctgcttcttcgggattgtcggttagttccagtgcttcggtcgtggtgagtacgtcggccatcttggccgagtcgtattcgttcatttggcagccgtgggttttgataaagagttttccgcgggacggggggcggtcgtgtgatgggttgccggggtgtgctgcgtgggtatggtgtgggtttggtgcgggcaatggcagcagtgcgggggcgtctttgtgctctttgccgtgtgtggggatgtttgatgtcccggtcatggtgcttaatccagtcgggtgggtaaggaggggtagtttagcgtgttgttgcaggagcttcagggggatggagatgtaggggcgttggctgtgctgttgtcatggggcgtgtttggcaatgatgggtaaagtttgggagactgaatggcatgaaaagtcgctttcgtatcctcggggtgttgttgaccatgatagcggtgcctgcttggggggcggcgctctacaagtgtttgaatgttgacggtataccgagttatgtcagtaagcgtgttgctggtgcgacgtgtacggttgtggttaatcatgtgcatcgtgttccatcgtcggctgtggctgttcctgccgcggtgccggtttccggggctgtgaaggatgctgtggtttcagcaccctcggttggtggtgttgcattgatgtcagccccggtgcgtcccgctgtagctgggggggggaagcgtttggtcagtgggcaggtttattcttatattcaggatggggtgcgtcattacagcagctccgctccgaggcaaacggccagtgtgcatgggttgcgcacgatttcttatagtttcatcgaaacttgttatgcctgtgcgccgaatcctggggtcaattttggttcggtgcctttgaatacgtcggcttatcatggcgaaatcgtttccgccgcagggcagtttggggtggaggaggcgttggtgcgtgcgattattcatgccgaatcttcgtataaccctctttcgttgagtagcgctggtgcgcaggggttgatgcagttgatgccagggactgcgcggcgtttcggggtcactgattcctatgatccgctgcaaaatatccgtggtggggtgcagtatttggcttggttgttgaagcgatttaacgggaatttgacactagcagcggctggatataatgccggtgagggtgcggttgatcgttacggcggtgtgccaccgtatagtgagacgcagcgttatgttgagcgcgtcaatgtgcttcttggacggtatcgcgcggcgttgatgagtacacatcaatgaaggcatctggtgttgtgtcggtatgggtacaggtgtggtgtagcacggtcatttttcgcgatgcgcttcacgggccgtcgtgcgctgtttcttcagtggtgcattggcaggtttggggatgatttgaggagcgctgcatggtgaaggatggggggcatgggtccagtgatttgaagaggcgacgttttcttactgcggtgacgacgttggtgggtacggtcggtgcagggtttctctcggtgccttttttcaagtcgttaagtcccagtgctaagagcaaatttgcgggtgcaccggtggttgttgatgtcggtgggttgcaagaaggtcagcgtttgattctggagtggcgtggtcagccggtctgggtggttaggcgttctaaggcagttcttgatgcgttgccaggattgagtgggcgcttgaaggatccaacgtctgaggtgaagagtcagcagccagtgtatgtgcttcacaatcctgatttgcgttcgatcaggccggaggtttcggtgttggtgggggtgtgtacgcacttagggtgttcgccggagatgatggccgagatccgcccggagtcgttcgattcagaatggaagggggggtatttttgtccttgtcacaagtcgcgttttgacatgtcagggcgggtgttccgtgggatgccggctccaatcaatttgttggtgccaccgcatcattaccgcgatgagcggacgcttgtgatcggtgtgggtccggaaagtgtccatcgggcaggggacgtttgaattcatgagcaacatcattgcgcgtggtgtccgaggggtgggggattgggtcggtgtgcgtgttccgggattagtgttgttttatcggaatcacttcacggagtactacgtacctaaaaatctcaatgtctggtattgcttcgggtcgctattactggtggtgttggtgaatcaggtcgtcaccggcatctttcttgcgatgcattacaagcccagtgttgcggaggcgttccagtcgatcgaaatgacgattatgcgggacgttgagtggggctggttgattcgttatatgcacagtacgggtgcttcgttgtttttcatcggggtatatctgcacatgttccgtgggttgatctatggcagtggaaagaaaccccgtgaattagtttgggtgttgggtatgttgatgtatgtggtactgatggttgaggcattcgtggggtacgtgttgccgtgggggcaggtgtcgttctggggggcgaaggtgattatttcgctgttcggtgcgatcccagtgatcggcaatggtctggatgagtggatcatgggcgattatttgccgtccgatgtgacgctcaatcgtttctttgcattgcacgtgattgcgttgccgctgttgttgggatttttggtggtgctgcatttggttgcgttacgcggtgttggttccaacaatccggatggtattgacatccatcagggccctaaaggcaatcgttgggattctatgcagtcagctgacagtatcccgttccatccgtattacacgcttaaggagatggtggcggtttgtgtcctattgttgttagcggccttcgtgatttttttcgctccggagtttggcggtttgtttttggagtacggcaattttgttgaagcgaatcccctaatgactcctgaggatatgaagccggtttggtattttgcgccgtattacgcgatgttgcgtttggtacctggtaaatcggttggtgtgttagtgatgttttctgcgatcgctattttgtttctggtgccctggttggatcgcggcaaggtgtattcgattcgttatcgtggctggattgcacggatagcattcggtgtgtttgtagtttgtttggtgtggcttgcggtgattgggttggggccaggtacggctgtttgggaaatctatgttgggcgggtgctgatttttttgtatttcgcatttttcatcactatgccattgtggacggtagtggcttctatgaagccggttccagaacgactgacttcccatggctgattggggcaggttattgcgttgtttgtgttggatactgtgcttgttgttcccatgtgtgctgatgtccgctgcacaggcggtggatggtgtcccgttggaacatgctggtaatgatgtgagtgatcgtatgtcgttgcagcgcggtgtgcagttgtacatgaattattgtgtgggctgccattcgttgaagtacctacgttattcacgtatcgctgctgatttgggtttaagtgaagtgcaggtgatgagtactctcaatgtcaccggtgccaagtttggcgatacgatcatgacagcgatgccggttgacacctcggagcagtggtttggtaaaattccgccggatttgagtttggtggcccgcgtccgtgggagtgattggatctacacttatctgaggtctttctacgtcgactcgactcgcccgctgggttggaacaatcgactgtttgtcaatgtttctatgcccaatccactgtcgcatctccagggtgtgcagcgggcagaatatggtggggcatcgcaggctggtgctgatcggttagtgactgggttggtcctggtccagccaggtcagcagaaccctgctgagtttgaccggactctgcgtgacattgtcaatttcctgcaatatgccgccgagcctgcggcgttacaacggcattctttgagagtatgggtactgttgttcctagtgttgttgacttttttggtttctctacttaagaaggcttattgggaggacgtgcattgatggacgtgatatcggtggcttgtatctgctattggtgtttctgatggttgattgcagaattgctgattgttatggagatcttcggcattgggccggtggtgttgatgtggccagcgtattccggctgttggagagccttgaatggcagtgaatgtacgtatgcgaaataccttgacgctgttttcctcgaccaatgatgtgttatgtcatcgcgttcgcttggttcttgcggccaagggggtgaattacgagatggtgtctgtagatccacagaatcctcctgaggatctgattgatcttaatccttatcattctgtgccgacattggttgagcgtgagttggtgttgtacgctgcttctgtggtcactgaatatgttgatgagcgttatccgcatccgccgctgatgccaatggatccgctgtctcgtgcaagactgcgtttggctatgttgcgtattgaacatgattgggttcctcaggtgcaggccgtccaacttggtaacaaggctcaagctgaagctgggcgtaagcggctcaaagaattgctgacggcatcgctaccgttattcaaggccagcaagttttttttaaatgcggaaatgagtttggccgattgtgcaatggcaccaattatttggcgtttgcaggcgctggacgtgtcgttgccaaaggacggtaaggcgattgaggattacggtaatcgcattttccgcaatccaggttttatccggagtctgactgaccaggaaaagaaattacgtgactttgttgtttgatagccatgttttgcgttcgggcatacactgttggttatgagtaaatttccacgaatgaccagtcatcggccctatctgttacgagccttggtcgaatggattaacgacaatgggatgactccccatattttggtggatgcgggcattcagggtgtgcaggttccggaaagtgcggtcaaggatggtcgggtcgtattgaatattgctgggcgtgcggtgatgcatttgcatattggcaatgacggcgtcagctttaatgcgcgtttcggtggagtcagctatccggtgcaggtgccaatgcaagcggtattagcagtgtacgcacgtgaaacagggcagggtatggcgttaccagacgatatccagggtgagccgccggaagatgtgccgccaccgcctgagacgccgagtggcggcaaagatacgtcccctgtttctgggaagcgatcgcacttgcgcgtagtgaagtaataacaggcagttgaggacgatgacccaatcccgttggcgtttggatggccgtacggctttgatcacgggggctagtacaggtatcggtctggctgttgctcgtgagttgttgggcctgggtgccgatgtgctgttggtagcgcgtaatgctgatttgctggggcgagtacgcgatgaactggcagaggaattccctgagcgtgagttacatggattggctgctgatgttgctgacgatgtggaccgccgtgcgattctggattgggtcgaagattgcagtaatggtttgcatgtgttgatcaacaatgctggtggtaatgtgacgcgtgcagcgcttgaatatacagaagacgagtggcgtgagattttcgagatcaatctgttctctgcgttcgagttgtgtcgttacacgcagccgttgctggcgtgtcatgcaagtacggcgattgtcaatattggcagtgtatctggcttgacgcatgtgcgcagtggagtgccgtatgggatgagcaaggcggcgttgcaccaaatgacccgcaatttggctgtggaatgggctgaggatgggatccgtgtcaatgcggtagcgccttggtatatccgtacgcgtcgtacgtcggagccgctctctgatgtgtactattacgagcaagtcattgaacgtacgccgatgcgccgcattggagagccggaggaagtagctgcggcagtggcatttctttgtttgccagcgtccagttatgtgaccggcgaatgtattgcggtggatggcggttttatgcgctatggtttctgattaaaggcgtgcatgtcattgttgaatcagtagcgaattcgtatcagggcttttaataaaattcctggatgtgtgctttgtacttatgtctcgttgcttctctggctcactccaggcagctcggagacgggttacggcacttttgcgcttatttatatatttagaattatagtgccaaattatcaattgctgagttcttgttttatgtacagaagtgcttaagtgtcaggcaccaaagcatctgttttcagcactattcttcaagtcatgaattcactagcaattagggctgttgctgacaatgtccggcgattgctggaggcgcgtcgtttaagtcaaaaagagctggctgttctctcgggcgtttcccaaaagtcaatcaatgatttgttgaattacggtggaactgttagcaaggagccacgcttgggaaccattgagaagctggcgaagggatttgggattgctacttggcagctccagattccagggttgcctgtcgatctgcttcagggtcagatggttagcaaggtcatcgaaaacttccgtgatgcaggaacggtcgggcgagaaaatatcagtcgtgttgctgagagtgaggtgcgatacagtctggtacaaaactctgaaaggggagattcccgctgaaagtgggtggtcttaattgtttttaactttagtttttcatgtgcattagggtgttttggcggatgggttagttctatagtgctaaattattttctatatttaatactatagcgcttggatgttgtatacttttggcattataatgccttgcgggctacccccgtggttttgatgccttccatccgagatatcgccatgaacgcagtcactaaagcacccactctcgtaggtaacggctgttatgaaagcgacctaagcgtagctagcaaagcgtgccgcaataattgccgcattcccgccagtgatccacaggccgcccgtttcaccaagatcaatgatgttaacggcgtttacatcattaacacgatcaaggctacgcatgatccctggtggagtttcggtttccaagctgccagctgccgtcactgttcaaagcgattagccgtgagcggctgcgaaacgtctttaattccgttaccgctgtgcgcggtttgatccgacactgcaaacgccaggaaatctatcaatcctcattttggaggacagtttgtttacagagaagacgctgctaagaggccaggagtgcatgtttggagtcatggatggcggcctgcttgctgtgaaattcgtaaatataaatgcgttctcagatagatcactagtggtcaactttactcataagcgcggtcagcaagtgatgagtaaatccaccactcgcataccaatgtatatcggtccaaggggacaacagtcgttgttagttgaatgggaacaatgctgacgataggagtttttcagcctcatcaggcatgcatcaggagcagtcacatgaacaatacgttcgattataaatttgataaatgcataagtggatcagcacagcaagcaagaatccaaactgatttccagatcaaatatggtgcggttttcggcgaggatataacgattggtggcaatgtctgtattagttctggcgtcagagttggttataacgcatgtataggtgagtcagtatgcattgctaaagaatcaaacattcgcaataagatccggattgaaaatcatcctgtcattggtgagtcggtaataagcattgccaaatacccatgcaccattgttacagcggtgggtgcagtatgaaaaatactttcaattatgtattttccaatgggcaaccagccacagccgcgctggattggatcaatccagatggaagtaaaggcggtatcgtcgctgccaacgccaatatcaatccgtctgtggtgattgatagaacttccgtggttgatgcgaatgtcaccattggggcaggcacggtgattggtggaaaaaccaagattggtagaaattcggtgatcggcacaaaagtcactattacttgtaatgctgatatcggtaataacgtctgcattggtaaagaatcaaaaattaataataaagtccggattgaggatcacgtcgtgattggtgagtcggtcagcattggctataacacgcacctagggcagtcggtcaatattggctataacgtgcacttaggtcagtcggtcagcattggccataaggtacacctaggcgagtcggtcagtgttgatgataacgtccacataggcgagtcagtcagtattggcgattatgtgcatttaggtgaatcagtcagtattgccaaattggcgtgcatcgctcgtcatgccagcattagtcatagagcatgtatcggcgagtcggtaagggttgtggaatttgcacgcatcgctcctggtgccatcgtcagtcaatgagcgacatatctatttttaagagatattccaagaatcagttcccctctccaggtctgaggagtcgtctgaggagtcgaggggctttcttgggttgctttttgcctgtatcagcttactttgtgaagcattctttatcttggagctgtgtggtaatagtcattgaggcgctgcaataggcgttcaaccgcattgtgattttttatacgccaattacggtaggaaaattgtctccgcataacgcgccttaagtgtctttaagcaagtattttagtcttggatttttctgtagggctatgttgacggtaggcggtatgtggcaatcaagatgatgagttgcaacgggtaatgtgtgtggcgatgcaggttatagccgtagtatgtgcccactgcgtgcgtcacggatggatgttggttgggccaagccaccggttggaccgtctacgatgcctgccaagtgtggtaggagtgagggatccaggtcttcacggcgacgtgctggcggctggcctgccacgttggcgctggtggagatcagggccatgttccaggcacggcagagtgcactgaccaatgggtgtgcgctgattcgtacagcaaggccgttatggtgtccggtgatccaatggggggcacgtgtgcttgctggcaggacccaggtatgtggaccaggccaactggtttggacttcatgcaggcgttctggtgatagcgtgtccagatctagccaatcttgcagtgtattgagttcggccgtgaccaggatcaatcctttcccggatgcacgttgcttgatattgagtagggtatgtactgccgtttcctgacgtggatcgcagcccagcccccagactgcttcagtgggataggcgatcacgccgccttgttgtagtgcggtgacggcttcgctgagggtgagtgttgttgccatgctgttttcagctgcactgagttgtcatgatctttgattgctgtctgtgtgaatagtgaagggcatagcataggtggttctgtcagggggtgaatgctgggttggaatggcgtttattcggtaatgttgggggcgatgcgttttttgatttgtttctttacgggcttatctgacacttttttggttgcctttgcgtccgtagtgcgttttttggtggtttgtttgcgcgtctcgttcttggttgcagtttttttcgtactgaagtttttgcgtgccggtttcccagtgtctatcagtaattgctgtgcttcttcgagagtcagtgaggctggttcgcgatccttggggatcttcccgttaagtttgccatcgctgatgtagggaccgaagcgtccgttcagtacttggatctggctgttttcgaagtttttgatgattcgattacgcgcgatttcttctttctcgttgatgagaaaggtcgcgcgcgccaagtcaatcgtgtagggatcgtcttcgcttttcagtgaaacataagtgctgccacgtttggcaaacggtccaaagcggccgatgccgacgctgacctgttggctttggtcttctccaagcacgcgtggcattttgaacaattcgatggcttcttcgaggctgattgagtagatgctttggttggggcgtaatgaggcaaatcttggtttttcttcatcatcaacggtgccgatttgcaccatcggtccgaagcggccaatgcgtccgctgacttctttgccactggtggggtcaatgccgagcaggcgcacactgccagcgtcagttttatcaagggagtcttttttatcttcaaccaattctttgaacgggacccaaaactttttcatcagtgggatccattcttcctcgccacgtgagattgcatccaattcatcttccaggtgtgcggtgaagtcgtagtccacgtaccgggtgaagtggctggcgagaaatttggagacggcgcggccaatgtccgttgggcggaagctgcgaccttccatgtctacgtatttgcgaaatagcagggtttggatgatggaggcgtaagtcgatgggcgaccgatgccgtattcttccagagctttgaccaacgctgcttcggtgtagcgtggtggtggctgtgtaaagtgttgttcggtcaggatacgttctagcggaacattttccccggttttcattacggggagtttgcggccttcgtcatcgtcttcggcgttcttgttgtccttgccttcttcgtacacagctaggaaaccttgtactacgacggtggttccggtggcacggaatacgtgttcgttgccggcggctagatcgacactggtggtattgagtatggctgggatcatttgggaggccactgcacgtttccacaccagttcgtatagccggtgttcttcgttagaaagatacggtgcgacctgtgtcggggtgcgtagtgctgaagttgggcgtactgcttcgtgtgcttcttgtgcgtttttggatttggtggtgtagacgttaggtttgtctggaagtgcgttggtaccgtagtcgcgtgcgatgatgtcgcggatctccgatagagcatccagcgacaggttgactgagtcggtacgcatatacgtaatcaggccgacgctgccttcctcacccagtgcgatcccctcgtaaagtttttgcgcaatctgcatcgttttacgtgtagtgaaaccgagtttgcgtgaggcttcttgctgtaatgtggatgtgatgaagggcggtgcagggcgtcgtttccgttctttgttggtaacgtcagtgatgtgcaggcgtccctgtgcgacctgctggatcctgcgttgtgcggctgcggcagtgtcgctgtcggtaatagtgaattgctcgaatttttgcccatccagtttgatgagtttggcgctgaagtgttgggcgggatgggcacactcggcatggatgctccaatattcgcgcgtgatgaatgcctcaatttcctcttcacgctcgacaatcatgcgcagtgctggcgattgcacacgccctgccgataaaccgcgttgtactttgcgccacagcactggtgagaggttgaagccaaccaagtaatccagcgcacggcgtgcttgttgggcgtctaccaggtcgctggcaatcatccgcggcttttgaatcgcttccttaattgcgcgtggtgtgatctcggtgaacacgatgcgttgcatcggtttgtccttcaataatccacgttctttaaggatctcggagatgtgccagctgatcgcttcgccttcgcgatcagggtcagttgctagatagatgctgtcggctgttttggccgcttttgtgattgcttcgacgtgcttttcgttcttgtcgatgaggtcgtagcgcatcgcaaagccgttttctggatcgactgcgccttccttcggtaccaaatcgcgtacatgcccgtaagaggctaagacggtgaaatctttgccgagatatttattgatcgtcttggccttggcgggcgattcgacgataagaaggtgtttgggcatggtgctgaacgtcttggagtgactgagctaggggcgggtagcgtggcttaattagcctgtagagggaagcagaacccgtgtgttgcaaacgtggaagtgatgggaaagttccttaattgtgtgtttgtcggattatttcccatagagtaatcatggcggcggttggattgccaagctggaatcccgcattcagtttgaagtagggatgcgcgagaggcaggcagatactcttagggaagcaggagtaatgacgaaattatcacaaataccatcaggggcacttaacacgccgtgtccaactgtcattgtagaggaggtgtggttgaccaatgaaatcccatctttcaccgatggggcgttgctttatgacagcgtgcagggtggggtggatttgtataaaaagttgttatcggtagtccgatgatgaagggagtgtggtgtgatggttcatagtgccgatgatgagggtgtcaagtagctggctatgcgttgctagcatcccgcttaggctgcttctttgtcatggatcaaggtcagcttggttttgagtggctctgaattgaccgcagcgctatacggtgaatggtgagtgtgaggatgtcagagggcattacattagtggtgctaaggttgccgcgttcaatcagtacagtctggtttagttcatcaatggtgaaaggcaagcgtggcaggttgatatgagttgtgccgcttgttcactgggaccatgatgtttccatctggataatgtctttgcttgcggttgctgcattggttctttgtgattgctctggcggttatcgttgaccgttcatggaatagggggaagctttgagcggtttgatcttgctggtcatgtgctggtcacgtccgtgtttgatgggcaagaaatacttgcgggacggcttgtgtttttaagtccggaggagttgaacatgcgcgttctaccgatgatgtaacccaatgtgttattgccgtagcggctgtggtgggtgttgcgtcttcattcagtgcagcggttccggttcgttgccgaacatctgtgtttccatccaggcgtaggcagcctcagctccgggttggttgaatagcaccatgagtacgacccatttcatgtcatctaggtcgagttcttcttggtcaagcgccattgctcggtcaaggaccagttcgcgctgctcggtattgaggatgccttgttgctccagaaatagaagaaaaccgcggctctccacgtccaatttgtctagttctggtccgtggaagacacgcaccggaccatttacacgtgggtgcgttagagtcggacgattggcggccaatgcatcaagccattcgaaggctttgttgatctcagcggggctgaaaccgacttgaatcaagccattctgcagcgagtcacggtcacggaccaagtccgcgttctcgctgaagtaatactcgaataggtacagcaagacagccagaatgctttctttcattgcctcttgggtctgcgccgagatgatgctgtggaggtgaggagcttaagcggtacgtgtataacgtccgtgttctacgacaacctttccttccagttccaacgttagaagcatggaggagagtgtggctgccgtcaatccagtacgttcaattaatgagtccatagacattgggtcatgtgcaagggcctgccagagtgtgtggtatttagggtcgttactgtttggtgtgcttaacgatggcgctacaggccaactgggagcatcaaggcgctcacgcaaggtgtgtgccaacggcgcggctagtgtagcgacgtcctccaatatttggtctatgtcttgaaccagggttgcgccttgacggatcaactggtggcagccgcgtgtcatagggttgtgtagcgatcctggcactgcgaataccgcacgccctgcttctgctgccagtcgagcggtgatcagtgcgccggaacgcgctccagcttcgatcaccagtgtgcccagcgccaagcctgcaataattctgttgcgttgtggaaagtggccggcccgtggttgggttcctggtggatattcgctgatgaccgctccgtctgtggtgatacgtgcgtacagttttttgtgacgtgctgggtatggcacatccgggcccgtaccaaggactgcgaccgtatgcccactgggtatgctgagtgcggcttcgtgtgctgtagcgtcgattccggctgccattccgctgatgatacccaggccgcgtgccgctaatgcctgtgcgaagccataggaatgatcaaggccgcctgcactgggctggcggctgccgacgatggcaatactggcgtgccatagcagtattggatttcctgcgatgaacaatgctaagggtggcgaagggacatgacgcagtaatggcgggtaatccggatcgtgccaaccgagcaggtgatggtaaggcgttgccaaccagtgttgtatgcgtgccattgcattgggatcgggagcaactaggcgggtgcactgcattgtgttacagccactggctcgccaagcatttggaccggcggccaatgcggcgtgtggtgtgccgtggtaatccagtagttggcgccgcggtgcgcttctgcctccggcgaggaccagtcgtagcagcgcgtccgtgtcttgggagtctgagtgggatggggatgccatggctgtagcatgggccaaacagtgatggcggtgctttcagatagcgccgcgcatcattgtcgggaaacccgccttagcgaggagatccccttactgtgcgtctgggtgcctcagcgtatagcccactttgacgggcttagttccatccatcactagtgcatagctgacatcgttaaaagtacggaacaccatcgcgtgtgcggtgtactcgtcgggctgcagcacagtgcctttatcagtttcgaagctgtcgttcacatgtgatgttgaggcacggtgtccgatccggtcgttgatgtagtgaccctggcgccagatcgaaaatacggtgccattattgatgccgttattggtgccaccagagatagcaatcacatcgcgcgggccgctagcgatgaaggcatcagccacggccaggacacgcaggtccgcatctttcacctcggtggccggtggatgggggaaaaattgaaggtcgtaaggttttgcttccagggggatcaaacgatctccagcacgtacctcgcgcccacccgtttgtagtgtcagagtggttgtctggttgtcatggccgacttgagccacggtcgcaacgttgactttggccagttcgtagcccaggaatccccggtgtttgtttggagcgatatattctttccagagcacaccgctgttgatggtgggttgattgtccatcaataggtcttcggtgggtttaggtagagagtagctgaccgttgggcgcatcactgcgtaacgttggcctggttctgcgccaatcaagccgacagcgtaggcggcttgaccataggtaccgcgcaggcgcccttcttcaaggccgactacgtagggcagcttttcgaaattgtctgtaatctgcagatctttcagaaacggctcaatctgcgccaatggtatggcatcaatcggtgcgtcctgacgtggtcctggttgtatggccttacctggatcggcaatcgtgtccttggccatgcgattcaggtaggccaagctgatcacgtcgccggggtagatcaaatgcgggttgttgatctgcgggttagcttgccagatttcaggccacagccagggctttttgaaaagacgtttggcaagtccccaaagcgtgtcgcctttttggacggtataggtatccggatgtttatcccccttttcaagggcgacagcataggtcgtaacggtcagcagtgcagcgatggcgaccgtacggaagagtttaaacatggcgatatcttcctgattccccaaaaaggtggggcactatagtccagattctaaagagctgcgcaagtattgagctagaatcgcgttgaaagttttccggatattccggcctctacgaagatgaattgaggtgccgctatggctttattgccgattcttgagtttcctgatcctcgcctgcggaccaaggcggtgcgtgtaggggttgccgaggtggtttcatcgtcgttccagactctgcttgatgacatgttcgagacgatgtatgccgcccctggtattggcttggcggcgactcaagtgaatgtgcatcaacgctttatggtgattgatgtcagcgaggaaaaaaatgtgccgatggtctttattaatccggagatcgtcaccagggagggcgatcaggtgtttcaggaaggctgtttatcggtgcctggaatccatgccgatgtgacccgtgctcttagcattgtggtgcgctttctggaccgccacggcgacgaacaacagctcaccgctgaggggctgttggcggtatgtatccagcatgagatggaccatctggatggcaagcttttcattgattatctctctcctctcaagcgtgacatggtgcgtaggaagcttgagaagcagcgtcggcgcgcctcctgacgcccgaggtaggatggggtctgtattggagagtggtgctggtctcgcttgggagtccacctcatccacaggccctaatattccccatcaggatcaccattatttatgagaattgtttttgccggtacaccggatttcgcggtgccatcgttgcgctcggtgactcagcgagccgatgttgttgcggtctacacgcaaccagatcgtcccgctggtcgtggtcgtgaactgactccttcgccagtcaagcttgaggcggtcgcgcgtggtctaccggtgtaccaaccccagactttgcgctctcccgagatgctggagcagctacgtgcattgcggccagatctgattgttgtcgttgcttacggggtgattctccccgaggcggtgttggcgattcctgatgatggttgctggaacgtgcatgcttccctgttaccgcgctggcgcggcgctgcaccgattcagcgtgcgattgaggccggtgataccgaaaccggcgtttgtctgatgcagatggaagcgggtcttgatactggccctgtgttgatgtccctgaagactccgattaatgcgtacgaaaccagtgggcagttacatgatcgtcttgctgagatgggagcacagctactttctgatggcctgggcttgttgcgtgctgggctacggcctgtgccacagccgcagttggctgctggtgtgacctatgcgcacaaactgggcaaggttgaagcccagcttgattgggagcaaccggccgaacggcttgcctgccgggtacgggcgttccagccatggccggtggctgaggtcgtattgtgtggtgagcgggtgcgtatccatgaggcgttggctctggatctggatcacagccagccgccgggtacggtgttggcggcgagtaaagaggggattgatgtggcctgtctgcagggtgcgttgcgtttgtgcaggttacagagggaaggtgggaaggcgatcaccgcggctgattaccttaacgcccgccgagacttgcaggtccgtgcgtgagcgatggcattgcaccacgtgtggttgcggcgcgcgtgctggctttggttgtggatcaggggcgttcgctcaagacggagctggccgcagcgttgccaaccttggaggatgtgcgtgaccgtgccttggtcgaggcaatctgttttgcagtgttgcggcggcgtccggtttatgaagctgcgctcacccagtggttggcgcgtcccttgggtcgaggtgatgcgcagttgcgcggtttgcttatggttggttttgcgcaacttgatgttttaaaagtaccgccgtatgcggcgttgtcagcgacggttgatgcctgccgcgtgctggggtggccccaccgggccagttttgtcaatgcggtgttgcgtcgtgctcagcgtgaacgtttgccggtcgtatcgtctgatgctgcttggccacgttggttggcagagcgcatccgtgctgactggggggagctggcagaagcaatttttgatgccagcctgaagccagcgccgatgtggttacgggtcaatctgcgctatggcgatcgtcacacctatgtgcagcgtttgcaggcagcaggtttggaggctgtaccaagtggattggtccctgaggcgcttgcgttggattgttctatgcctgtattgcaattgcccgggttccaggccggtgaagtgtcggttcaagacttgtcggcgcagcaagtggctgcgttgttgtcaccagcgccacacgcccgtgtgcttgatgcgtgtgccgcgccaggcggcaaagctgcgcatctgttagagcgtgcgcccacactgtgcttgactgcgttggatgtggatatgcagcggttgcgccgggttgctgagacttgtgatcgcatccatgtcaaggctaggttgtgtgttgccgatgcgactgatcttgcagcgtggtgggatggggaggcgtttgatgcggtgttgttggatgctccctgctcagcgactggagtggtgcgccgccaaccggacgtgctgctccaccggcgtgccgaggatctattgcctttattaaatattcagtcccgattgctggatgcttgctggcgcaccttgcgccctggaggagtactggtgtatgtgacctgttcggtgctgcgtgccgagaaccagacacagttggaagcgtttctggccaggacggtcgatgcgtgcgccgaggaccctggggatgcgtatggtcagcccgctggtctggggcggcagcgcttgccgggtgaacaaggcggtgatggctttttttatgccaggttgattaaagaaatataaatgtgaaatgtatcagttcaagtgactattacagcttcatgaaaatccggcacgtttcacatcaagcttggttgctgcttctggtggcgttattggtattgggcagcggtttgggcttgcgcgatccgcatccggccgatgagccgcgtttcgctctggtcgccaagcaaatggtggacagtggggagtggttatttccacatcgcggcaatgagttgtattcagataagccgccaatgctgatgtggttacaggctgctttttatactttgttcggcaatttgaaagtggcttttttattgccttcgttgttagctgcactgggtacgctggtatgtgtctatgatcttgggcgcaggttgtggacgcgccggattgggttgtatgcggcgtatgccctgctgtttacgcttcatttcacctatcaagccaagcgtgcacagattgatgcgttagtggtctttttcatcacctttgccaactatggtttgctacgccatctgttgtttggcggtcactggcgttggtgggtgctgggttggtttgcggccggtctagggacgatcaccaagggtgttggtgcactggcgctgttgattgtgttgccggcagcggcggcttcattggcagggtggccgcgggtcagggtgcacgtgcgtgatgtgcgcttttggttagggccgctgggtttcttggttgcggtctcgctgtggttagtgccaatggtgatgaccgcgttgtctgctcagcagcctgaataccgtgcttatttgaacgatattctgttacggcagacgtttgggcgctataccaaatcctgggaccatgcacagcctccttggtacttccttcaagtgatgctcgtgatgtggattcccacgcttctggcgttgccgtgggccttgccggcctggtggcgcaggttgcgtcgccgtgatccccgttatttgctgcccttggcgtggtgtgtgttgttgctggtgttcttttcgattcccagtggcaagcgagatgtttatatcctgcccgcgttgccaatggtgtgtttggcgctggcaccgttgttgccaggattgttgcgtaagcgtgcgtgttcccggttgctgctggcgtttggcgtgctgctggtgctggtgctggcagtgtttggggcgggcttattgatctgttcggattggcaggcacggatgatggaggggaccacgttgattttggaggatgtgcgtgtgatcgcgtggggggttgtagcggtcgcatcatggggagtatttagcttacttgcgttcagccagcgtcgtcccgttgttgcggtgttttcggtccttacggccctgtggctggtcttcgggttggtgctgatgccggttgcaaacgattccagttctgcgcgtggggtcatgatgactgcgggcaagcgcatcggtccggccgctgagcttggtttggtggcttggaaggagcagaacctgttgatggctgaccgttcagtagcgacctttggtttcttagtgccttgggacgagcaattgcgccgtggtattgcttggcaggtgcagcggccgcggcagcgctggttgttagtggaggaggctgccatgttcggttgtatcaatcgtagcgccagtgtgtttgtcggctcttcgaatcgccgtgcctggtggttagtgccagcgtgggccgtgcatggggcttgcataatgactcaggctgagcatgctcgtttgagcaagcaagaggatagaaattttgattaatggataggctattgctggtttttctattgttgtaaatgctgtgatgggtagcgttgtttgtttgcgtgtgttgggatgcagtgatgaggttaaagagggaagtgctcaattttttcccacgcaagcattgagtgcagcggtgtagtatcgggtcgggtgtgatctgtgggtgagctacagaagtgcattgttgttttgcgtctcagctaacgaaatgtcgtgtttaaaaatggcggcggttttatttgcaacgttagacctacgcagtttctatatgaatatcaaattaaatcaatgaattgtggagcgatgccccgctctgcaattcacagggttgctgtggccttggctcctttacatttgcgcacatcatgttctgtcatcgtcaccgatgcctgccccagttgtgcttgggtttggtggatatcacctaccaagtccgccttgttgggtatcgctggggtgttcggtcattggatcggtaggcgtaagggtgagtggcgtgctcttgagtagatgagcaaagttcattgatgcatccgttgatgcgggtccctcattctctggattctcctggctgtggtgtgcaggatgatgtgcttgcttgcttgcttgcttgcttgcttgcttgcttgcttgcttgcttgctgctcagcggtgcgatggtgcgttgtgtttttgaagcaggcatccaatgaagtgttggagatatatcaaagtcagccatctgatccacaagcacggtcgttacgatgctgaatggtgaaatgctggttttgaaacagctggaccttgttacccattagggcaaagtcaccgtggagcattttgctgacgagggtgagaagcggcgctccattcctggaatgtgttgcgcagtgatgagtgactgcgctgacgtgggcgggggatgatagtattgagaacgattcttgtcattaagagtgttttgtgacgttgttggatatggtgttgcgccgcactgctgttgtggtagcggttgaggatcgtcagcctaacgatgtgattgcacggcgcttgcgcgaattgggtttcgttgccggtgaggagatcacagtgctggcgactggccctttagggcgtgagccgctcttggtacaggtcggctacactcgttttgctttgcgcagggttgaggcgcagcgcatccgagtggtgccgatggagacggtcaatgagtaagcatgtgctccggttggctttggtgggtaatcccaatagtggtaagacggcgttgtttaatcggttgacgggtagccgacagaaagtggctaattatcctggcgtcaccgttgagcgtaaggaggggcatttccgcgcatcgtctggacgtgagttcgtgatccttgatctgccgggtgcttatagttttcagcctgctagtctggacgaggcgattacccgtgatttttgccgtggtttctatcctggtgaggctccgccggatgtgttggtttgtgtggttgatgcaaccaatctgcggttgcatttgcgttttgtactggaattgcttgaattagggcggccagtcgtggtggcgctgaacatggtggatgctgcacagcggcgtggtatccgtattgatcgcgtgattctggagcagttgttgggcgtgccagtggtggaaacggtggcggtccgccgctatggtgcacgcgcgctgcttgagcaactcgacacgggggtgatgccattgcctgcacctgtacccgcgttagccgctggtgaccagtatcacgcgcaagtgcgtcatattttggaggcggctgtcaaaatgcccagtcgcacgtcgcgtgtggatgacgcattggaccgctggctgttgcacccggtgtttggtttagtggtgctgactgttgtgatgttcttgatttttcaggcggtatacgcctgggctgcgccgctggtgagtttgattgaggggggcaccacggggttgggtcattgggttggcaatagattgccggacggtccactacgtagtttagtggtggacggcatcattaccggtctcggcggggtactgatgtttttgccgcagatcttgatcttgtttgctttcatcctggcgcttgaggagtctggttatttgccgcgtgcggcgtttttgctggatcgactgatggtgctggctgggttgtctgggcgttcgttcattcctctgttgtctagttttgcttgtgcagtgccgggaatcatgtcaacgcgcagcattcaggacccgcgtgatcgccttgtcaccatccttgtcgcaccgttgatgacctgttcggcgcggttgccggtgtatacgttgctcattggtgcgttcgtgccgcgtaaatctttgtgggggccgatcaatcaacaggggttggtgctatttgggctgtatatggcgggaattttcagtgcgcttgtcgtgtcctggacgataaaaaagtggcaccgcggtacaagtgagcatccattattattggagttgccttcttatcgattacctcacccacgtgatttgttgctgggtttgtgggagcgtgcggtgatttttcttaagcgggtcggcggcattatcttggcgctgactattttgctgtggttcttgctggcgtttccggagccaccgtccggcgtgactggcccagcgatctattacagctttgctggaagaattggccatgtgatggcgggattttttgcccccttaggttttagctggcaaatttgtattgcgttgatccccgggttggctgcccgcgaggtcgcggtttcttcgctggcaacggtgtatgccttgtcagcgtctaatgaggagatggctgtacgggcattatcgccgttgattcaagacggctggtcattagcgactgcgctgtcgctcctggtctggtacatctatgcaccgatgtgtatttccactctggcgacgattaagcgagagactaattcttggaagcacatggctatgacggccggttatctgtttgctctggcttacctggcggcgttggcaacctaccaggtggcattgttactgggggcaggttaacccatgaacgtctctttgttgttgcagtatgtggtgattgcgctggcggtgctggtcagcgtctttgtggtggttcgtaagtatctgcccgggacctgggggcgtgtctgtggtgtattgggtgggtatttgacccgccctggtcggcctgtttggatacagcgtttgggggatcgtttggtgccaaggatgcgccgtgccggtgtttgtcatgggtgtgacaattgcacttctggctctggtggtgggggttaagaggagggagcagacattctttatttagaatcatgtaacgatttggtaacaggaacgatacagcatgactaaggtgcaactcgcaaagcggggaaggggagtctctccgatttatctggacgaggacgaccagtcaaagcagtcaaacattatttacatgagaggccgcaggcggcggcgcattgtcttcggttggtatggaggaaagttctcgcatcttgattggctgctgccattgttgcctaagtgccaccactactgcgagccgtttgcgggttctggtgctgttcttatcaatcgtgacgcggctcaggtcgagacatacaacgacattgacggcgacgtggtgaatttctttcgagtgttgcgcgaccggaatgaggaactgattagggtcatcgctttgacgcctttctcccgcgaggaataccaccgtgctatctatggcaccaagaacggaatcagcgatgtggagcgggccagaaggttctatatcaaggctcgccagacacgcactgggcttgctcaaaccgcgtcccttggacgttgggctaattgcaaggacacgagccgggccggcatgtctggtgttgtctcacgctggcttggtggtgtggatgcactggatgacattgcgcagcgacttatccgtgtacagattgaaaatcgccctgccgttgatgtgatccgcctctacgatagcgttaatacgcttttttattgcgatccgccgtatttgcatgtcacacgtggcgacgctaaggcgtacagctttgaaatggatgagggacagcaccgtgaatttgccgaggtagtcaatgagtgcaaggccatggtcgccgtttcagggtatgagcacccactgatggaggagctatttaagccggaacgctggttcaaaacccaagggcaggagaagacgattcattcaactaagggaaagcgagcggaagtgctctggacaaattacgatccacaaaaacaaagtcagaagggatgagttgcatgacgcccgatcagattcttcaagacatccaacagcgggccgccgcaactctgaatcgctctgttatcaccgacgtagaaatccgtaggcgcgtcgatgatgtttgccgctgcataagcaaccgctcaggagttcggctgttgatgtcttgcttgcttgggaagctggacaggcccaaagtcgatccgcgcaagccttatacagaaattagcagcgctgacagtttttctggacgaacctatgacgaacgctacctgagcaagttcatcaaagagcatcaattgcccgtcaatccgacaacggcatttttgacgccgacgttgcgcaacatcaatcaccccctgaccactgaccgggaactggttgggaggccgcgggacctttacaaaaagaccttggcgctgttggaggatgtggcggtgagccgtatcaaagcagacgtggttttcgtggaagttgtgcgcgtgctgatgttgttgcgtgatgaaaagttggcccgcatggcatctttgctagacgccttggaacgtaccgagggtgcgttgccattgtcgtcggaagtcatcgtcacattgataagccaacaccttgcttgcaagaacgcaagccgcttgccggtgctggttgttgctgctgcttatcaagcagtaggggcgatgctttccgaaagcatggtacttctaaatgctcacaatgctgctgatcttcaaaccggctcattgggtgacgttgaaatctgcatgatgggcagtgatgtggtcgtcacggcttacgaaatgaaaatgaagcgggtgacgcaagacgacatcgacgctgcagtgaccaagatcgctagagggtcgaacaaaattcataactatctctttgttactactgatgtgatcgatccacgtgtctccaagtatgctgctacgttctacgagaaaatggacggcattgagattgctattctcgactgcgtcggtttcttgcggcacttcttgcacctgttccaccgcatcagggctgattatttgaatgcttatcaacgtctcgttttgaatgagccggattcagccgtcaaccagacgttgaaagaggcattcctggcgttacgacaggctgcagagagcggtgaatgatacttggatggtgcaggctttcatcttggcccaggttggtgcgggattctgaacagcatttgagccagtcgtgatagcagtttgtaagtgaggttgttgctgtgacacacatgtatgtggcccaacttgggggcaatacaagtgaatttttttaagtagaggcggagctattatcttacagtgtgatgccccaggatcggcgtcgtgtccgagtgcaaggggcaatagcatgtgttccgaatcaaggtgtttttgccaatcaagccatgggcgaccaagttttggatctataaaatcagtcgtaaagctagtgtcattgtgctgcgtttgtatccagatgaaggatgtcttgggtggcacttaattggaatctacaacggcgttaatctgcccggttgctgctgatttttcacctgcgaatgggttcagcttgcggattgctgccgggtatttgggccatttgcctttgagccatggatggtcgggggcattggtttgcaatacctggcgtgcattgtctgcaagtgtcttgttacccaaatgggtgtaagcctctccaagggcggccactgcatcgtattggaaggcgctctgtgggtaggtttctagcagaaaattggcgcggcctgcggctgcgacccaagccgtacggcgcaggtagtagagcgtaacgttcatctcgtattgggcgaacatgttacgcagctcagtcatttgcttcttggcatcggcagcgtaacggctgtttgggtagcgatccagaaccgttttgaagtcgttgtaggcttgctgtggggcggataagtcacggcgactgaggtccagtgaccagactttgcgtaaaaatatggtgtcgcggttgctgttgctcaggccccgcaggtagtacagataggggatgttatggtgcgtcgggtaagtgcgtatgaagcggtcgattgatgatacagcgtcgtcgtgtttgcccgacttgtactgtgcgtaggcgttctcgaccattgcttgttcggtatacgggccatacgggtactgggcaatgaggcgcttgaagctgacctcggcaccggcccagttacctttcttcatgagcgtgtgtgccttgtcgtacagatgttccaccggcatgccatcatcagcgttctttttggcctcgcggtgacagccagtgatgaggacgaaggtggccagtagcatggccaataggtgggtaggtgtgaagaaggtaggacgttggatcatgggtttgcgtggcacgcatcaatgatatgaagcattgatgatagcctaatggcatgtcctgtgactgacttatgctcccgctagtgccgaatttcgctgtttttgttggtgtctatgtccgatgacctcgctggattctcccgtcagaccactgtgccggatggcgctgctggccgtcgtttcgatgctgtgttggcagagctttttccggaattctcgcgctcgcgcttgacagaatggatcaaatctggggatgtgctgttgaatggagtgttggtacggccgcgtgatccggtttacggtggcgaggtggttcggttgcaggtcgtgccagatatccgcactgatgcggttccgcaggatattccgttagatattttgtacgaggatgagcatgtattcgtcctcaataagcctgcggggttggtcgtacacccgggtgctggtaatcccgatgggacgttggtcaatgcgttgctgcatcgtgatccggcgttagcggcggtgccgcgcgctggggtggtgcatcgtttggacaaggatacgagtggggtgatggtcgtggcacgtacgctgcaggcgcagactgcgttggtggagcagttgtcttcacgtcaggtacatcgccagtatttggcagtcgttgtgagtgcgttggtttccggtggtacggtgaatgcggcgattgaacgtcacccgcgtgaccggctgcggatggcggtgtcagacaccgggaaggaggcagtcactcattatcggttgcgggaacgtttccgtgcgcacacggcattggagtgtcgtttagatactgggcgtacgcatcagatccgtgtccacatggcgcatctgcgccatccaattgttggtgatcggttgtacggtgggtcgttgaagctgccaaaggtcggcacggatgccttggtggtcatgctgcgtggattcaagcgtcaggcattgcatgctgaggtgttggagtttctgcatcctgtaggggcactgcctgtgcgtattgttgcgccggtgccagaggatttatgtcagcttcttgcggtgctgcgtgaggacagtgcgctgttctttgagcgggagcggcgttgagatgggtaggtttccatcttgggtgttagtggcggattggccggcgccgcccggtgtcatggtattgagcacgttgcgcggtgggcctggtgtatccgtagcaccatttgatcggttgaatctggggaactgtagtggcgttgcaggtgatgctcctgtgtgtgtggagcggaatcggtcgcgtttggtcgagatgctggggttaccgtcggtgccgcactggttgcggcaagtgcatggtgtggaggtgttgcgtgtcgatgcgcttctgcagtcgattgctcgtgtggttgagccgacggctgatgctgcggtgaccagtgtggttggggcggtcttggcgattttgactgcggattgtttgccggtggtcttggctgctgttgatgggagtgagatcggtgttgtacacgctggttggcgtggtttggctgatgatgtgttagggcgcacggtggctgcgttgcggacgtcgccagagtatttgcaggcgtggcttgggcctgcggctggtccacaggcctatgaggttggtgtggatgtgtatgcagcgttcgttgagcgggactcgggtgcagcttgtgctttttcagtgacccgtcccgggcattggtatgttgatctgtatgcgttggcacgacagcgtttgatgcgtgcggggctgtcggcagtctctatttatggggggggcttatgcacaatctccgatccgcagcgatttttttcgcaccgccgtgatcggcgcagcggacgttttgccacgttggcatggattgggtgttaatgcgtgtttctcttcagttcatcgggtggtggatgctggggtatgtgctgtgtggttggtggatgtatggtgcgtggtgcggtagggggcatgcttcaaggacgggcattgcgtggtagcctggattggctgcgatgatgtgtttgccacttgccacttgccacttgccacttgccacttgccacttgccacttggtaggttggtgccgctttaagtgatttttatcagccatgatcgggatgagtgttggcagtgttgttttgttgggcggtaatacatgcgttgtgatgggcgcatggtcctcggttgtggaaacggtttatttgtgtgtgttataggcgagtgtcgtggtggtctgttggtgcgtgattcgagtatgaggtctgggctggttgctgtaatcggtacgttggttctaggttgggggggggggggatggtgagtcggttaaggatgggcgctgctgtttttgggttgctgtgtcggtgccgaaggtggaaccgttgatctgcgatgagggtgtgttgcgtcaggttgatacgactactgcggtgattgtcttcgatggggtctgcgtactatgtagtggttgggtgcgtttcttgttacgccgtgatcgaaaaaaacgctaccgttttgccgcgatgcagggagagcatggtggggcgttgttacgtgcatatgggttggatccggaggacccgctttcgttcttgttggttgaggatggaaaggggtggagtgattcggatgcggtgttacgtgtattagttggtttgggtggtttttggcgcgttgctgcttgcttgtacgtgttgccgcgtcgttggagagatgctggttatcgttggttggcgggtaatcgctatcgttggtttgggcgccatgagcagtgtctgctgcccgagccggaagagcgtgagcgtttctttgattgatgttttggcactttatttagtgcggtgatgcggtgtgctttggtgcgggtatacgtagctgatgctttatcgtggcaagcaaatgttgttgcaagaaataaatcgggtgcttggaaggctctgtatgttgagacggcccgctggagattccagcgggccgtttgtcaaagcgcttgcatttccgagttggcgttgtgggtgggggaatgctgatgcttcggggcaatggttgggtcaggaggggtggcggatttgtccggtacttctagatagggcagtgacagcgtttcactggtcattcgtcgaattttgttggtcagtgccgggctgtcgttgatgtgttgtccataggaaggaatgatcttcttcaactgcgtttcccagccatttttcatttgttgcggaaatgctttggccagcagatccagcataattgagggggaggttgatgcgccgggagaggctcctagcagggtagcgagtgtgtggtctttatccatcacgatttcagtaccgaattgcagaatcatgcccttctccggatcgcgtttgatgatttgtacacgttggccggccgtgacgagtgtccagtctgttggtttggcgttggggaagtatttcaaaagttcggcatggcggtctgcatcggtgagtgtggcctgtttcatcaggtatttcacaaggtcaatattatttttgccgacgctcagcatgccggcggcgttgtgatggttgactgatgagtagaggtcgaaccaagagccttttttcaggaatttggtgctgtaaagtgcgaacggtccaaagagaacgatggatttaccgtcgagttttcgggcgtccaggtgaggtaccgacatcggcggcgagccggactcagccatgccataggctttgacgttgtggcgcttagtgatggctgtgttttcgaaggacaggaactggccgccgaccggaaagcctgcatagtctttggattctgggatcccggacagttgcagcagtttcagtgcagcgccaccggctccaataaacacaaagcgtgatttgatgctgcgttcttggccattgttgaggtttttgacagtcacgttccatgttttgtcggggttttggcgcagtgcggtgacttcatggtccaggtgcagtgcaaagttttggctgtattgcagatgcttggcaagatcccgggtaatgacgccgaagttaacgtcagtgcctagcggcatgtaggttgcagcgattttctgatcctgtgtccgaccttccatcagcagtggcgcccactgttggatgaccgctgggtcggtagagaactgcattccgtagaacagggggttcttgatgagggcgttgtgacgcttgcgcaggtattcgatccggtcttcaccccagacgaagctcatgtgcggggtcgcgttgatgaactctgtgggtgcgggcaagcggccatgacggacctgatgggaccagaattcgcgtgatatctcgaattgttcggcgatcttgatggcgcgtttgatttcgatggtgccatcttgcagttctggtgtgtaatttagttcggcgaatgcggaatgacctgtgccggcgttgttccagccgtccgagctttcctgtgcgatgccgttcaggcgttcgaacaactcgattttccaatctggttgaagttcctgtaaataggtgccaagggtgacgctcatgatgccgccaccgataagtacgacgtctactggggtgtcgttatttgctttggggacagaacgctggtacagcggccagtacaagaatagaagtgtcgccagagcaaacgccacgatgaggccagtgaggtccttaagggatttcttcatgggatgtggggtgtctcgggaaggaaaattggggtgttacttgatttagatgtgggacgtgtcagcgacggtgtgcgctgttttggttgaaaaccagcaaattttacttgaaaaacgtgacttttgttggtttttttggggctttattattaaatattgaatttaaagtagcgttgacgtttgtattttagtggtattggagtaggtaacgttatttaatgtctcgcctattattatgtgtatagatgcgcagtgtttaatggctaatggggtgacaaggctgttttggtttgtcgtgacgttcgtaaattaactttctggtgttagttcaatattcgagtcatggtttcttgtggctgatccgttatttgtttcgcatattttttgcccttggataagggaaagtggttttttcaggcaagtcaaatatataagacaagtattccagccagggtggagtttccgtttagaactgataaatgtcttaaacgggtatgacgttagtgttgaaataaggcatgcggcctgcccagtattgtgcaggccgcggctgtatttacttgagtgctttaaagcgtagccgtttggggccggtgtcgttgccgaagcggcgttttttatcttcttcgtactcgcggtagttgccttggaaaaactcgacgtgcgagtcgccttcgaaggcgagaatgtgggttgcgatacgatctagaaaccagcggtcgtgggaaattacgaaggtgttccctgggaattcgagcagtgcgtcttctaatgcacgtagggtttcgatgtccaggtcgttggatggttcgtcgagtaaaaggacattaccgccctgtaacagggtcttggccatatgcagacggccacgttcgccaccggacagtgaaccgaccatcttttgttgatcttgacctttgaagttgaagcgtccgatataggcgcgcgactggatttctatgccattgatgttgaggatgtccagaccgccggaaatttcatggaatacggtatggctgccttccagcttatcgcggctttggtcgacataagccagttttaccgttgagccggtgataatctcgccggtatcaggtttttcctggccggtgatcattttgaatagtgtggattttccggcgccgttcgggccaatgatgccaatgattgcgcctgccgggacgaggaagctgaggttgtcgatgagcaggcggtcgccgaatgtcttggagacgtttttgaattcgatgactgaggcgcctaggcgttcgcctggcgggataaatatttcatttgtttcattgcgtttctggtattcctgcgattgcagttcttccaggcgcgtcaagcgtgctttgcctttggagcgcccgcctttggcattttggcgcgcccattccagttctctatggattgctttttgacgtgctttttcttggttttcttcttgtttcaggcgatcttctttctgtacgagccactcggtgtagttgcctttccagggaataccgcggcctctgtctagttctaggatccattcggcggcgttgtcgagaaagtagcggtcgtgggttacggcgacgacggtaccggtgtagcgttgcaggaattgttccagccactccacagactcagcatctaaatggttggtcggctcgtcgagcagcagcatgtctggtttttgcagtagcaagcggcacaatgcgacgcggcgcttctcgccgccggacaggttgctgatggcggcgtcccatggaggtaaacgcagcgcgtctgctgcaacgtccagttgttgttccagggtatgtgcgtcgttgcttgccaagattgcttccaggcgttcctgctctttagcgagtgcgtcgaagtcggcaccctcttcagcgtaggcggcgtagactttttccagcgctgcttgggcttgcatgatctcgccgacgccttcttcgactgattcgcgtacggttttttggggatccagttgtggttcctgggccaagtagccgattttgataccaggctgtgcgcgagcctcgccttcgaagtcggtgtcaacaccggccatgatttttaatacggtggatttccctgcgccgttcaggccgagcaggccgattttggcgcctggaaaaaacgatagagaaatgtccttgatgatctgccgtttgggcgggatcactttgctgacacggttcattgtgtagatgtattgcgaggacatgcggtctccgtagacgcagtgcggtcatccgggcagggccggaagggggcgagataagaggcgctgattatactgtcaagccgcgtgatcggggttgatgtgcataggcagtgacttgcgtgatggggcgtgttggttgcgccgcgtttgtgtgatgggtgtttagggtgttgctggttgcggtcggatgaaatgggtcaggccttctgggacattacttaatgtttttgcccgaatgtttccgcatgtttctgcctggatattttcactgtgtgggaagtgtttagccctctgtcgccctgtcagcatgatgttcctgttggagttgcgtgcggtgattcttgaggctgttgtttgggattgttgaggatggggcatggtgacgttggtgtgcttgtggctattccacggggtgtcatgatcttaatcgtttaatcctatgcagcttttttcatcgtgattggcatgaagcattgatctggtagcagatgtttaatcatgttctggctggccgggtttcattgctgtgcagagtgtgttgcggtgcacaatctgtgtggaggggaaggggcagagtgaaacgtgtaggctgatgaatttgctcagtccagtgtggtgggttttataatttcgggtgtccagatgctgattgcatcccctgtgtttttttccggagttgctatgttcccgcgtgatgctcgtcttgatatgtacgatcccgaattggctaaggctattgctgctgaagtgatgcgtcaggaggatcacgttgagttgattgccagtgaaaattattgcagtacgttggtgatgcaggtgcaggggagtcagctgaccaataagtatgctgaagggtattctggaaagcgttactacggtggttgtgagtgtgtcgatatcgctgagcaattggcgattgagcgtgccaaacagctgtttggtgctgactatgccaatgtgcagccccatagcggttcacaagccaatcaagcggtgtactttgccctgttgcagccgggcgatacgattctcgggatgagcttggcgcatggcggccatttgactcatggcgctaatgtcaatgtgtctggcaagttgttcaatgcggttcagtacggagtcaatggtcaagggttgattgattacgaggctgttgaatcgcttgcgttagagcatcggccgaagatggttgtggcgggcttttcggcgtattcgcagaaaatcgattgggcgcgcttccgcgccattgctgatcaggtgggcgcttacttgcttgtggatatggcacatgtggccggcttggtggcggcttgtgtctatccgaatccgctgccgcatgctcatgttgtgacttcgacgacgcataagacactgcgcggcccacgtggcggcattattgtggcgcaggcaccacaggaggcgttggttaagaagttgcagtcgattgtgtttcctgggatccagggtggtccattgatgcatgtgattgcggctaaagcggttgcttttaaggaagcgctggagcctgcgtttaaggtgtatcagcagcaggtggtgaagaatgcgaaggcgatggctgagaccctcatgttacgtggctataagattgtctctggtggtacagaaaatcatttgatgctggttgacatgatcggcagggatgtttccgggaaggatgctgagggtgcactgggtcaggctcatatcaccgtcaataagaatgccgtgccagatgatccgcgctctccgttcgtaacctctgggttacgcttggggactccggcagtcacgacgcggggttaccaggagcaggattgtgtggacttagcgcactggattgctgatgtgcttgacgcgcctgcggatgcgacggtcattgccgcagtccgtgagaaggttgcggcgcagtgcaggaagtatcctgtgtatcgctgagtgtctggggttggaatggtgcggtgcttggaacgcagtgacgcttcttggatattcttgctgtgcttcagtgaaggatatttgagtgatgatgcgtttcaaggactgatttaaggataggttgggcgatgtttgttcggtcgctacgtgacagaagccgtttgttttacttcacgcatgcgttgctatggggtgcgcctatccttttgattggtgggccactatctatgggtttattacttattacagttctgcaaggcaatggttcgatgatgacgaatggattgattctgggatgccttgggtcgcgcttcttgggattggttggctggttggtgttgtcgtatgcgttcttgaccggagggcggcttggtttggtgcagctgagttggaaatggtggctctgtttgatggccggtgttccggcggctgtatttttattctggtttttctatattgtgacttttaatggtggctcctatcactcggggtttttttatgggtggggtgttttctgtcttggtcctgcggtgttaccgctgacattgcatttattgtggctacgttgcgtatcgcagcggcggtcagagcaatgcaacgtggttgaccgtatcaatcccacttagtgttggccgacgagtagacttgcgtgtatgtattgtctgttttgccagcatacctatacccgagtgattgattcgcgcgtctccgaagacggtgcgacaatccggcgtcgccgcgagtgtgaggcgtgcggtgagcgtttcagtacgttggaaacgattgagttgaagttgccggtgatcatcaagaaggatggcgggcgtgaggcatttgatggacgcaagctgcgtaccagttttgatcgcgcgctacagaaacgtccagtggctgaggagtgcattgagatggcgctgcgcgcggtgatccaccgtctgcgtatggccggtgagcgtgaagtgccctcaatcgtggtgggtgaatatgttatggctgagttgcgtaagctcgaccatgtgggctatgtgcgttttgcttcggtctatcgcagtttccaggacgttgccgatttccgcgaagagatcgaaaagcttgagagcgagttactggtgagtagggagcagttgccgttgttggaagcagcaatggaatcaatgggacacccttctgttgatcaggggggtaagcacggcgtgtgatgcacatcatcactgtttttcatgtgttgcgattgtttgttgatgcgtttggcgttgcatcggtatttgggtcgctacccctaatgagtttggccaatcttggactgtgcaactgcctttgatgagggcattccggtgcctgtcggggcagagggtgatgtggtcgtttggctatgtcagtttgctgaatgaatgtaacgttgagtgtttgcaatgttcactgtggtttgggttgctcatcacgcgtgttgacgtgtgtgcagggcaggcccatgggtgggatgggcgggtgcagtgtggtttgagtgtgtcaatggtctgcgcgagtatgtcttttactgttgttagctggtcttgtccttgatgaggctgcggctacgctggttgtcgagtatggtgattcacctggatagggaagctgagcgatgagcgcattttccgtggatgattaccgtcacatggaacgggccttgtgtttggctgagcgaggtgcttacacgacgcgtcctaacccaatggtgggttgtgtgattgtgcgtgatggtgaagtagtgggagagggttggcaccagcgtgctggcgatccgcatgctgaggtatttgcattgtgtgcggctggagaccgcgcacgaggtgcaacggcttacgtcacgttggagccgtgtgcgcacttggggcgcactccgccgtgtgcgatggcgttgattgatgccggagtgagacgggtggtggcggcgatggtcgatccatttccgttagtcaatggtgggggagtcactctgttacgtgcggctggggtgacggttgagcatggtttgatggaggcgcaggcgcgtgcactcaaccgtggctttctgtcgcgggtggagcgtggtcggccatgggtgcggatcaagcttggtagcagtttggatgggcgtaccgcgttggccagtggcgaatccaagtggattaccggggaggcggcacgtgctgatgtgcagcgttggcgcgcgcgcgctagcgcgattttgacgggggctgggacggtgcttgccgatgatccggcgttaacggtgcgcctgggtggggaggagggagcgtttttgccgccgttgcgggtggtgcttgattctaggttgcgttcacttagttgcgtgaaggtgcgtgacggtactgcaccaacgttgtatctgcatggttttggggtcacgtccccggtgttgcaacacgtcgatttttccgaggttcagcaacgtgatgctgggcttgatctggaggctgtgttacgcctgttgggtgagcgtggcatcaatgaggtacaggttgaggctggggcgacgttatgcggggcgttgctgcacgctgggttggtggatgagttactgatttatattgcaccgttgttgctgggtgatacggcacggccattactggctggattggatatcgggcgcatggatcagtgcattggtttgaaggtgctggaggtcgttcaggtcggcaacgatctgcgattgttattacgtccgtgtggttgaatggcggtagaggtgcccagtggcatttcaggtctccagggggcatgttggcgcacgttttccatcgtaggagttgtggtgttgctgtggttgcatgggggcgggtgatgcagacagtgtccggatgttgaccgtgttctggggaaggatgttgagggtttgtcatgctcggttgcgatgcaatgtgccgtgtctcattggtatcagtgatgagggcagcgctgcaggcctgttagaattgcggttcccggtttggccggtgattgcgagccttgggatagggtgagttctttagcttagggtgcagtgcattgtggcgcatgaggttgcgaggtgccgtgttgcgttgtgcgacgcaggcgggcgtaatcggtgtatgccgcagtccagaggggtcgtatggataaaatgcgccgcacacgtgtgcttctgttgcaggtgcttgttgcgccgagtggcgtgtttcgctcatgacaaggcaggaaatgtaaatgcaaattctttttgaagttgttcattgtcttcgtgatccagcatcgtggtgcattgttacggtcgtgcagatggaacgccgggagcagtcttgatgttcacgggcattattggtggggtgggtcgtcttgctgcgcgcgtgcggcagggaggcgatgtgcgttttacgttcgaggtcggcacactaccgttctccgaggtcagttacggagaaagcattgcggtgaatggtgtttgtttaacggtgaccgcattcgacgcgctgtgctttcaagcagatgcctccacggagacgctcgctctgaccacccttggtcagttacctgaaggggcgacgcttaacttagagcgggcgatgtgcccgaccgatcgcttaggtggtcacttggtcagtggtcatgtcgatggcattggtcgggtcttgtcggttcacgaggatgcacgtgcgcagcgttggagtttcgctgttccggtaccgttactgaagtatgtggcgaaaaagggttcgatctgtgtcgatggggtcagtttgaccgtcaatgcggtgaatgcggaagggttcgaggtggcgttgattccgcacacggtggcgcatacccggttttctcgtacggtgatcggtgaggcagtgaatctggagattgatttaattgcacgctacgtcgaacgtttgttggtgatggggaacaagcaatgaattcttttgcagcggttccggtgttgattgaggagattcgtgctggtcgcatggtggtgatcgttgatgacgaggatcgtgaaaatgagggcgatctcattatggctgccgagttggttgcaccgaaggacattaatttcatggtgacgcacgcgcgtggcttggtctgcttgtcgttgacacgtgagcgctgtgcccagattgggctgtcgccgatggtgcagcgcaacacgacgcggtttcagacgaatttcacggtcagcattgaggctgctgaagggttgacgaccggcatttccgcgtatgaccgggcgcatactatccgtaccgcagtgcgtccaaacgctaagccatctgacctgcatcaacccggccacatcttccccttgatcgcgcagccgggcggggtactgacccgtgctggccacactgaagcggcgaatgatttgccaatgttggctggcctggaaccggctggggtgcttgtggagattatgaatgctgacgggacgatggcgcgtcgcccgcagttggaggtatttgcgcagcaacatgggttgaagataggttcgatcgctgatctgatcgcttaccgtcttgccaatgaacacactgttgagcgcgtggacgagcgtgtcattgagactgagtatggttcgttcttattggtgacttatcgtgatcgtatcgcccatgacctgcattttgcgttggtgcgcggtactttggacgcttcgatcccaacccttgtgcgggtacaggtagagaatcctctggctgatatgttgcactggcgccgtgaagactttggtgtggctgcatcggatgcattgcgtatgatcgctgcggctgagcgtggtgtgatggtggtgttggcagcgccacgggatagtgatgctttgttggcaaggctccggcgtgagccggaagtggtttccaatgtgaaggatgtagggcagtggcggcgtaacggtgctgggggacagattctggctgatcttggcttggggaagctgcgcgtgttgggtacgccgcgtcgccagattgccttggccggatttggcctggaagtgctagagtacgtggagtgccgcggtggggccccggtcgccccccagggtgtcgattgaattttcctcattccggagtccaaccttagatgacccactacgaaggcgatcttcgtcccgcaggtgcccgctttgtgatcgtctgcagccgctggaacgctcgtattactgatgcactggttgctggtgcctgtcgcactcttgttgacaatggtgtatcagatgacgcagtggatgtggtgcgtgtgccgggtgcatgggagatccccatcgttgccaatctgcttgcgcaggtagggcagcatgctgccatcattgcattggggtgtgtggttcgtggcgatacccgtcattacgagcatgtcgccgatctatgtgctgagggaatgatgagtgtgcagatgcagacgggtgtgcctgtgctgaatggtgtgcttgctgtcgagtgcattaaagatgccgagatgcgtgctggtgggagtcatggtaacaagggggcggaaactgccttggcggctttggaaatggtgagtttgttggagaagttgccatgagcaatgcttccggtggcggaccgcgtccgagacgccgggatggtgttgatccagcgctgcgttcacgtgcgcgccgtcgtgctttgcaagcggtgtacgcttggcagatctctggtggtgttgctaagcaggtaattgctcattttgcacatgagcaggcgtatgaggtggctgatttggcctattttgaagatttggttgagggggtattgacccactgcgccgaattggacgagaagttgaccccgtatcttgaccgcacgatagaggaggtcgatgcgattgagagggcagtgttgcgtttgggggcttacgaattgctgtatcgccaggatgtcccttaccgagtggtgatcaatgaggcgatcatgactgctaaaaggtttggttctaagtatggtcatacttacgtcaatggtgtgcttgatcgtgctgcgcttgccttgcgtaaagttgaggtgcttggatgaagtctgccgttccttacgtcggcgcatagctagcagctgccagcagcgacggatgttcgatttcttccgtactggtatcgcgtcacgtcaatgcttgagtttgatttgattgaccgcttgcgtggtcgtatccgtccgcgccaggacgtgctgttaggtgtgggcgatgatgctgcactcttgcagccaccacagggtgagccattggtggtcaccaccgatacgctgaatgccggtgtgcatttcccagttgagacccatcctgaggatctcggttggaaaacgcttgcggtcagtgtctcggatttggcggcgatgggggcaacgccacgttggtgtacgttgtccttgtcgttgctccaggcggatatggcatggattgatgcttttgctgatggatttttcgagctggccgatctacacggtcttgttctggtcggtggtgacacgacatacggccccttggctacgtcggtgaccgcgattggttgcgtgccaccgggtatggccttgcgtcgtgatggtgcttgtattggcgatgatatttgggtgactggccgtcctggcgaggctgctgcggcattggcgatgtggtgtgctgggatgcttgacatcaccaagtgtgcgcctgatccgcgctgtgaaatattgcgccagaggttgttacgtccgacgcctcgggtggaagtggggctcggtttgcggggattggtgcatgctgctgtggatctttccgatggccttctcgccgatttggggcacatttgtgcaagcagtggggttggagcagtgttggaatgtgcgtccttaccgcgtgttgcagtgcatggcggatgggatgaggcgcaggttgcttcttggcaattggccggtggtgatgattacgagctttgttttacagcagcaccgcagtgtggtgccccaatacaggacatgtgcgccaatttgggtgttgaggtgacacgcattgggcgcattgtggttggtgagacagtgcaggttctcaatgctgcgggtgtgccttggcaactttcgagaaaaggttatcagcacttcatggattaaatgatggatgtgtgattggtattgggcctgtagcgcttttccctccggcagctgttttatttgcaggtgatgactcatttggcgaagggagaacgctatgtttttcatctgccgtacattcgttgttccatctggttctgggtaccataaaagtcagcatttatcacgtaaatagcgtgattctgtaggcgctgagggtgctggataacacgctgaggaatgttatttcataatgaaattttgctgtatttatcatttaattccctgcgccaagcgcggtacaaccagggtaatgtgacgcatgacgtacggcattcaggttggttgatctattcatatttccttgttgaatcatggcacgttgaagcgttgccgaaattcctgtgactcgtacccacaacatggaatatcctatgcacaattcattctgcttctgcggagtgccgcttccagatctggtctatgccaagttaaagtccaaggaagaattggaacggtttcctttcacggaaaggggccgcgattggacaccggaaaggtccgagacggtgttacgtcatgatggtgtggaatatcagcatcgctttcacgttaaatcgttcgaaatgaaggatggcgacaacaccaagcctttcgagggcgtttttcgatggtttaaatactgtgtcgcggaacctttggttggtctccgagtccaggtatcgccagcatgagcgcgctagtcattgatatccaggcggtacggaagttggttcaggagctgcatcgtatccatcgtcatgatgcgcgtgccgctggggtaaaggagcttctccacgaaatccgtaatggtggaaatggttggaacattattaacgacgtggtgcgattccgtgtccaactcgaacagcgccaagtgatgtcaggtggacatatcctcgctgaggaccagtagtgaatggtgatcttgtctctttaaatgcctctaaacacggttggatttgtggcggcattgtgtcttggaggctgaagagcgcacgttgtgatggacgtggggacttgcgatgtggtttgcgggtctaacgacaccagcggttctagggtatccggatgatgtgggttgctcgcatgttggttgctgttgttgcagtagggttacggtacccgagcggacgatggcatcacagcagtttttagcttttttagatagattttcaaaagtgtttagggagtcgctggggggattgtcaatgtgtgttgggttgttggccggtggtgagtcggtgtggagtgatcagttgttgcagagcaagtcaggttgctttcacaagacttccgatgcgtagtcagccaggcgcgaacgttcgccacggcgcaaagtcacgtgtgcactgtgaggccatcgtttgaagcggtcgatggcataggtgagaccagaggtggtttctgtcaggtaaggggtatcgatttgttcgacgttactgaggcagacgattttggtgcctgggcctgctcgggtgatgagggtcttcatctgcttgggggtgaggttctgtgcttcgtccagaatcaggtagcgcgataaaaaggtacgcccgcgcatgaagttcatggagcggatcttgatgcgactggtgagtaggtcgttggttgctgcgcggccccaggcactcccttcatggagatgtgtgagtacttcaaggttgtcggtaagtgtgcccatccacggtgtcattttttcttcttcggtgcctggtagaaagccgatgtcctcgccgacgttgacggtggcacgggtcatgatgatttcgcggtaacgttgctgttccatggtttgtgctaggccggcggccagtgctagcagggttttaccagtgccggcggtgccgagcagtgggacaaaatcaatatcaggatccatcagtgcgttgaatgcgaagttctgttcccggttgcgtgcggtgatgccccagaccgtgtgttagtcgttacggaaatcgtttaccagttttagcgtcaccttgcgattgtctagaacttgaaggacccgcagttcgatgttttcttcacctggaaggtagaggtcttggttgggataccattcttcttctttctgcaatgcgatttcgcagtatgtgcagcctttgtcattccaactacgtaggtcttggtgatgctttttccaaaaatcctccggcagtgcgctgactccgctgaagagtaggctgaagtcgtccagtgcgcggtcgttttcatagtcctcagcgattaaaccgctgattgatgctttgatgcggaggttgatgtctttggacaccaagatgactgacagctttgggtgttgctcgtgcagtgtgagcactgccgccaggatgttgttgtctgcaacgatattctgtaagggatttccgtgtttggtggagtggatttggaagtacagcctgccgatgccgcattgatccttgagttggatactttcagggggacttagggggatgccagccttgatctgatcggcgttggtgttgttgatgagttcatcaagaaagcgactgacttggcgtgcgttgcgactgatttccgaggagcctttcttagtattgtctaattcttcgatcacctgcattggtaggaacacgtcatgttcttcaaacttgaacagggcggttgggtcgtggatgagtacgttggtgtccagtacgtaggtacgcttgcctggtgtcatctgaaattcctggtgtggcgtaggggccgcttgccatgaactgtgttacgggagggagggctggttattgctcggcatgggccttgagtttgttcagtacttcttcagcgtgtcctggtactttgacttggcgccatgcttcaacgatgcggtgtgttggtccaatcaggaatgtgctgcgttctattccaatgacttggcgcccgtacattgttttttctttgattacgtcaaatgctttgcacagtattgcgtcactgtcgctgaccaatgggaatgtgaaaccctgtttggcgcagaagctgtcgtgcgatttgacggaatcacgagagacaccaaggacagttgcgttgatctgttcgaattgcggcagtaggaggttgaactccagaccttctgtgctgcagcctggcgtgttgtctttagggtagaagtagagcactagccattggttggtatagtcgctcagtgttttacaggtgctgcccgatagcatcaatgggtggttgagaagcgaatgattcagggtgtcgccgatgttcataggtgaggtgctgtctggagataatgcggaagggggacctgagcgttcagaatttcatcggatctagaatggcatcaagattgaggtgatcgcagaactctagaaaatcatcgcgtagtgcagcgatatgcatgtttgcagggataccgatagtgatttgtgccgagaacatttctgcgccggtttgcattgcccgatagcgggtgctttgaaggttttctatggtaattccctggcggtcgaagaaatcggccaactgaaacaaaatgccttgtttgtcggcggcaatgacttcgacgatatatggcagcaggttggactgagtttgtttggcaccagtacggtaccagatcagtttcaatccttcctcgcgttccagtcgtgagagcatcgcttcaagtttggcaacagcgtcccaggatccggttgctagcgttgttatggacacgtcacgaccgactgttgctagccgggcttctatcaggttgcagccgctatcggcgatacgacgggtcacggagagtaagggggactccgggtgcatcgagtacgcgttgatcaggaggtagttttcggtcggcgagggccgtgcagcggggtctgtcaaaggggagtccggcattgcatcaggctgaatggtgctccagtttctgtttggagcggtcaccagcatacttgcccctgctttcttgccgcaagtaacatgtttggaattgtatccgtggcttgtacttcaaagctgttgtcctcattaattttaagagtattactgtcttgtcactttccgggattattactgcgctggtcactccgtttgatcgagatggcgcgtttgaccgtgatgcgtggattcgtctgctggatctgcaattagcgggtggcgtgcagggcgtggttattgctggttccaccggcgaagcagcgacgttgaccgatgctgagtatgacgagatgctgtgctcggctgtggtccgagttggtgggcgtgtgccggtgttggcgggtactggtttgtctgggactgcgaaaacgatttctcaaactaaacgcgcggccgacaatggtgcaggctatgctttggtggtgacccctccgtacatacgtcccaaccaaggtggtctgaaggcgcattatttggctgtggctgaccaggggggattgccagtcgtgctgtacaatgtgcctagccgcaccggctgtgatctgttgccggagactgtcgctgatttggcggggcaccctaatattgtcggcattaaggaggcgtgcgctagtcgtgagcgtgtccaggcgctgcttgctttgcgtcgtccaggctttactgtattcagtggtgatgacagcagtgctgcgcgctcgatgttggacggtgccgatggtttggtttcggttgcttccaacgtattgccgtccgcttatcgtcatctatgtgatcttgctcgggcgggtgagcgtggtgctatcgatctgtggaatgcgcgtctgtctgattttcacgcattttgtggtctcgactccaatccgattccaattaaggcattgttacagcgtatcggcattggttatggattgcgtctgccactgctacccttgtcggtatgccatcatgacattgccgatcacttggctgaccaagtggcggcattggaagcactttctagccgtaaaatagttgcggcctgacacaccaggagatttttcgatgcgtcgttctgttactactcttcacgtgtatgcactcgtgttattggtcgttgctgcattgagtggttgtactttgttgcgtaagggagtgcataaggattacgcgctttcaccagaaacccgtccgttagaagtgcctccggatctgaatattccggcgacttctggagaggggaaaatactgccccaagcatcttcgatacctcaggaacaggtatcagattcaatctcagctaaaagtggttttaccattgctggtgaccgcgacaaggtatttatcaacgtgggtaaggcgttggtcgatatcccagatgtcattatctcgagcaaagcgcaggccctaggtttttatgatgtcagttattgggatgagaaatttttggtccgtgtggctagaagcggtacaggaagtgctatttcggtggtcgattcgcgtggtatgccggcgactggaaaagctgcgattcaactcataggtctgctcaaaaccaagcttgctcgttgatctgttgctgtcagtgatggagtaagaccacagggtgttttgatctaggtggtcatcatgtaaatggtaatgcctcagtaaatgctgcggcattgtttttgttggcttaagcaattttatctttaggtgtacttcaggctgtgtattgcctgatgtgtcatttctatattttttaatgttatttcttgttgcgtctctggttatcttcaaagagtactttttgttgctgttgtgtttgaagtcgaacgaggttgttatgacagttttaggatgttgatttagtgtggcgaattattgattagcaaaggttttataaaatgatccacgattaaattaatcgaattttttagtgtattttttcttgatacacaatgaatgacgacattcttttagagaaagctgtctgttcaaatgtcatgtaaatacgatggtgtttattgtaatggtgtttcggtttgggaagttttaggtattgttaagcccgttttttattttttgctcggttgagcaggttttaggatcgagtatccgttgcgagcgaattcggcctaaattgttgattacgatgaggccgaataagcggtcattgttgcagaagcggatgctgatattgctgccggcattgcggccatctggaaggaagcgaacccgtggccgtccagatgtggagataatgcttagagaaccgttattggtgatttgctcttggtacaaaatggcttttgatgaggtgggttgtggcttgcgactcgaatcgcgataggtgatccagccattgctccaattactatcttgacgacatttattgtcgccgcggctcgggcagacgctgacgggcgtttgttgggtgatggctgccagtctggcacctgcaaactgggaactcagcaaatgcattttattttccagtctttgacgttccagagtttgtttgaagaatggtaacccgatggcagtcaatagtgcgattagcgccatcgtgattaatagctccggcaatgtatagccccgggatgatggcataccgatagtctcgacaatagtttagggccgaagtctggtttaaatgatcagtttagcgaattaggttaatgccgctattttgtgtagggatttcacctgctttcatatcagtcatttaattataaactggcgcaccgctttggaatcactgtgttatgacaggtttgtttcagcttgtttcttcatactctccttctggggatcagccgacggctgtacagaagctagtcactaatttccatgctggcatcgctaagcaggtgttgcttggcgtgactggttctgggaagacttacaccatcgctaatgtagttgagcagattcagaagccaactctggtgatggcgcccaacaagacgttggcagcacagctttacggggaattcaaggcgttcttcccgcataatgcggtggaatattttgtcagctactatgactactatcagcctgaggcgtatgttccagcctcggacacgttcattgaaaaggacagttctatcaatgaatacattgaacagatgcgtttggctgcaacgaaggctttgctgtcacgttctgatgtgttggtggtggcgaccgtgtcggcgatttatggtttgggtgcgcctgaagattatctttcgttacgtttgattttgtcgttgggtgagcatattgagcagcggcaattgatcaggcatctcactgagttgcagtacacacgtaacgagttggatttggtgcgtggtagtttccgtgtgcgtggtgaggttgttgatgtattcccggctgagtcagagatggaggcgctgcgcattgagttgtttgatggtgagatagaaagtttgagcttgttcgatccgcttaccggtcagacggtacgtaagctgcaacgttatagtgtttaccctaaaacccactatgcaactacgcgtgaacgtacgctcagtgccgttgatacgatcaaggatgagctgaaagagtatctagaacttctgtatgggcggaataagttggttgaggcgcaacgtttagctcagcgtactcagttcgacttagagatgatggccgaggttggttattgcaatggtattgaaaattactctcgtcacttaactggtaaggctccgggggaacctccaccgacgttgttcgattatctgcctccggatgcgctactggtcattgatgagtcgcacgtgacaattccgcagatcggtgcgatgttcaagggggaccgttcccgtaaagaaacgctggtggaatttggtttccgtttgccatcggcgttagacaatcggccgcttcgctttgaggaatgggaagtgcgttcgccgcgtagcatttacgtctcggcgaccccagggtcatatgagttccgcgagtccgcgggtgaagtcatagagttgttggtgcgtccgaccgggttgattgatcctgagatagaaatccgtccggttgcgacgcaggtggatgatctgatttcccagatcaatgtgtgtatcaagttaggtgatcgggttttggtcaccacgttaactaagcgtatggctgagaacctcactgaatatttgagcgagcagggtatccggatacgttatttgcattcggaaatcgatacggtggaacgtgtggagatcatccgtgatttgcgtcttggtaaattcgatgtgctagttggtatcaaccttctacgtgagggattggacatgccggaggtgtcgttggtggccattcttgacgctgataaagaggggtttttgcgttcgaccagttcactgattcagacaattggtcgtgccgcacgcagtgtgcgcggcagggcaatcttgtatgccgataaagtgactcgttcaatgcgcgctgcaattgatgaaaccgagcgacgtcgacaaaagcagaaggaatacaatgctgagaacggtattgttccgaaatccgttgtacggcccattagcgacattttggagggtgcgcgagatggtgtcgaggtgaagagcaaggggaaggggcgcagagttgatgaggttcccgctgactattgtgcgcttaatcaagctgagattgccgcgcagatgaaagtgctggagcaacagatgtaccagcatgcgcgtgatttggagtttgaggatgcggcgcgtattcgcgatcaaattcagcggcttagggaggctggtctgggttaaattgaaccctcgaatattgtcctgtacaaggcagcgtgttgtgactcagtgcggtactgggctacaatccggcgcgcgcagacgtatgtttctgcggtgtgggtacgggcggttagctcagtggtagagcactaccttgacatggtaggggtcacaggttcgaaccctgtaccgcccaccaatagaatcaataggttgcacaatctgtgaatcattgactggcgcgcagctgggccatgtacgcatcaatagcccgaacagcatcggccatatagtcaggccgctacttggcatagatgtccgtaatcccactatatgcacggtgcccaagcatcccttgaatgtcttgtgcagccatgcctgccgagcgtagctcggtagccatcgtgtgccggattacctttggaacggtgtccttgggtaagcctgcatgtgtccgtaatgcgcgccgcgcagttttgaagctcgcaataggtttgccgtgccagtgcaccagaggaccgctgtctactgacagtatccaaggaaggagaaaatcacagatgggaacgacaggccgaaactttttcgtctgcttgcgccctggtagattctgcgtcaataggcgtcgttggatgtctgcgaactcacgccgtagtccgaggatcgcctctggtcttgccagagttccataagcgagtgcaaggtacatacgttcatgagatagggtcgcggcctcccataatgcggctgactcctgaagtgatagcacctgatccctgggcggtgcgtctttccctgggatgatgtatggcaccgaagtaatttccccttccttgtatgctcgattcaatgcggctttcgcgctttccgctgatgtggtgttctgggcatgttgctcccaatacctggttaggactaagtccaggaggatatcctgtggcgtttgtttgcttacatcgccatgtttggcgtaccacaggtataaacttattttcgcttcttgaatatccgttgtgccaagagatgcgcgctttgtccgtcgagtagcagactcacaccatgttcgataccagtttttagagtcggcacgccgactgagccagtatttcccaatttgtcctggacgttcctgcattgttgaatgtattcctcaatgatttggttgctgtacctgtaaattcgggtactgatacggatggggtgtatccagcctgcgatgcgttctcgagtgagtgtggttttactgatgcaaaggcggcgcgtggcttccccttcgccgtataagtcgggaagcttctcggtagtgcccatgtaggtttcctcctgtgctaggacggtgtttaacaaaaccaaagccttgtagtgcaggcccgctccgcgcttcatcaagtggatgtgactctgccccctttgtgcttgcgtaaatagtcctcagtcatcgctacctttgcgcctgttttggcttggtaaacctctaatgcaccgtcgaccatgtggcgctcatccatagcgagcacatcaccaggacgctctcctgtaggtaggcgaggtaccattgcgtccctgagcgtttggctcgctgtgttgtacaccgcgctatgcagggtgctgtgtgtattgcgctttagtcaggtgctggccgctcatggcattgatcgtgggacgcaggcgtcagtgggatcaggtttgcatggggatcgcatgtgtccattacggattctggcctcatggatacgcgcgtgcggcgtgatgcggctccctagcgttgcgttggcaggtttgctgctggtgtcttgctgcgctagtcagtgagcatggatttgtgtcactgcggtgttgctgttctatcggtatgcgtgctgcattgtggtgtgctgtcttgtgggatggtgcggtatgcctgtgtcagtcgtgttgctgtgaggcggggcatcatgggttttttggggtgatgcaggtcgttgcattgatcattagaaaataggtggttgcgagcattcagcggagcgttgttgaggtcatgaaggttgtgtcgtctgagggcgttaatgaagtgtctcttctctgaactactggatgctgctgttggattgggctgccgtgcgagtggtcatcgtgtcagactgcacacatgagtgagatgctgatcctggtggtcgatgaccatccactatttcgcaatgcggtgattcaagtgctgcgtgaaaattttcaggatacccaggtgctggatgcttccagtgccgcgacgctcaggtcggcattgcaggcatatccgcaaacggaattggtgttgttggatttggcaatgccaggcgcgcgaggtttttcggcgttgctgcatgtgcgtggtgagcacccggatatccctgtggtggtgatttcttctaatgatcacccacgagtgatccgtcgtgcgcagcaattcggtgctgccggttttattcccaagtcctcaccaccggagacgataacggaagtggttgcggcggtgttggatggtggcacctggttcccgccgatgttggtggagtgttctgaatccgatgctcagttagctgttaaattggctcgactgactccacaacaattccgggtgttgttgtgcttggctgatggcctgttaaataaacaaattgcgtatgaattgggtttggcggaaaacaccgtcaaggtacatgtgaccgctattttgaaaaaattggagtgctatagccgtacccaggccgcggtattggtgaagtcgcttgagcctgaagcctagacacggctttataaacgcggctggtgaaggatgttttcagtcttggcgtagcagtgtttgtgtcatcagtgcacgtaatgccggtggccgtacaggttttcccaggaagccccagccccgattcaatgcccggtcgcgtagggttggatcttcttcggaggtcatcaggatcacgcgtggtgtgtgtccccagtgtgtcatcagcagtgatattagaggggtgtcgccgtgttcattgatactggtatccatcaggatcagttcgggcggtggtgcagtggcggcggcgatgagtgcttcgtccagacttccggtaaagccaaccgcacagtgccagcgttccagcagggtgtggatggtttggcagacgctcgggtcgttgtcgatgcaccagaccaggcagccatgcagcatcgggtcatcatccagctcgcgggtgggcattggtgtccgtgtgaatactgggtgggttgttgtgatctgctccagtggtacgctgactgaaaacgtgctgccgtgtccaagagtggagcgtagtccgatacggtggttgagcaggcgtccgatgcgttcgacgatggccaatccaaggccggcaccgcggtcgttgaccacgccgtcatcaaggcgtcgaaattcctcgaagatttcgctttgcaagctttcgggaatgcccggtccttggtcatgtacttcgatgcgtaaccagttgccatgtcgccggcagcctatcagcacgcgtccgcgtggggtgtagcggattgcgttagaaaggaaattctgcaaaatccgccgtagtaaggtttcgtcgctgcctacgatggcgcggcttggtacccatttgagggtgattccgcgactttgcgcaaggatgccaaattcacctgccagcgtttctagcagtgttcccagtgcaaagtgatgtacttgcgtttttaaggtgcctgattcaagccgcgagatgtccagcagactgctgaggatggcatcttctgcgatcagcgccccatcaatgttgttggcgatgcgcagtgcatctgtgtcgtgcaactgtttgcgcaacattgctacaaacatgcgtgctgcattgagtggttgcagtagatcgtgtactgctgaggcgatgaaacgggttttgtaacgattggcgttttcggcgtcgaggcgtgcttggtccaggtcgcgagtgcgctcggcgacacggtgttcgagtgtgtcagcgagtaaacgtagttcgcgtgtggcgtttttgtagctggtgatgtcggtgtagctggtgacgaagccaccctctggcagggaatttccgcgaatttccagtactgtgccgtcttctttctcgctttcacggatgtgtgccttgccgctgcgcaggtggttgaggcggcgttggattgcctcttcaatggggccatcaccaaggaggccacgctctgcgttgtaacggaataaatcttcgatcggttggccgacttgcatcagttccggggggaagtggaagagttcgacgtaacgtgtattccaagcagctagacgcagttcggcgtcgataatcaccaccccttgaggtaagtgttccagactgcaatgaagggtggtattgctgttttgggtggtttgtaggatcgcgctttgtacgctatgtggtgtttcggtctgttgtttcagtggcatgcttttgtttatgtctgttgctctagcacagcatggctaggcaatgttgctgctgaatgaatattgctcgtcctctgtgtcagccaaatgtggttggtgctgagtgcggggggatgcctggtgcgatgctcgtatggatggtgtgcagcaaatgaatgtgtcagtggctgttgagtatggcaaggggtagcgacggcgttgtgtgtggtagtacctggtcctctccctgggggagcaggtgagtgttgctgaagatcgatgttaggggagtccccgctgtctatgttcagtacgttctgtgtacgtagggacggaagtgtcggttgctgtcagcgttattgttctgctcgttctatttgcttgcggtcagtgtcatgccgcggtggtcaatgggggcatggttgcggtatggggagtgcgttgcgtgcgttccagtgtcgggctgtttgggatggttttgatttttctattcgttgagctgtgtcccgttcctgctcctccagccaatgcgatgatgttctccaggcagtggttgtgaatggttgcagtggtggtatgtacagcatgtgtgagtgccgtaggttgcatcatcgtttgtatcgggtgcgctgactggacgatatgacctgttgcggtcatatcgtttctcaggatgatcgaaaatagcagcggcacgcctccagtgccgctgtcatgatgatttagggttgatacctggaaatgtgccaaatgccacatcatgtgctgttaccacgtgatgtggctcatggttcaaaaatgaacttgggcgcgtagttcgacaatatccggtgtggtacgtgtgccaaggcgagtagcgttgactttgacgtagtttgcttggaatttgaagtagttggtgaggtaccagttggcgccgatggtccagtcgtgttgacgcccgccgaggatgctgccgttatccaggttgaggcggctgtagcgggccagtaattcgactgcgccgtagtcgtgcatgggagtgacgttgccaacggtgccagctgtgtaggctcgggactcgccagtcagtacccaactgccgtagatgtactggccgttgccgttgtacgtgggtaggccgttgttacgtgtcactttgatgtgcagtgcttcgctctgtatgagcaatggaccttggatccatagttgctccaggccgttgcgttggatttggtcgacgtcaaccagtgtgcccgagtcgatgaggcgcacgtcggtcagtccgctttccggacgggcacgcacccgggtacgtgggctgaaggagacgtttaatccgttatggtagccgcgtgggttttcctgtgagtaggacacgcccaagtgcagtacgtcgccagtggtcttgaacggagtccatattgcacggatggcttgggtggtgcccgggttgtcgccttgtagatctttgccgccgtaggcaccggtttgcagcaggtactgtggacgttccagcacccattccacgccggtacggcgcccttcatagatggattgcaccggcagtgcagcttccatgaagcttccagcgcgtgagctggcgagtgcttccatacccactggggttttcatgtagcctaggcggatacgaccgtaatcctggtcaaagagtgcttttgtttcaaagcggaagaaaacgtccagccacagtttggattggaagtcaaaggcaacagcggcgtcatagacatccttctttttaattgagatacccaattctttgcggcgcataaaacttctgtctttaagacgatcatcaccagagaagttgttgtagtcgtaagcaaagtttccggttaacgaagcttgtgttgcgttgccaaaggtgtattgcaatggccagtggttaaagtcgccagcgacggcagcggaagcggtgcttgtcaggcatagggtgaaaagaaacttgatggagcgcatagcggttctctggacgtaaggttaatttagggggttgttgttgccaaaacattcccatcggagggaatgtgcatttctgggacaggcgtttacaggcgcgacggtgttttcaagcgccttaacggaatttgagcaaatggtaaaagaattcacaagatcttaatcttagtgcccgtgtgtcgatctttacggaggttagtaccaataggttatctgcatgactacgccatccttcgagaattgcaccatttgaagcccgcactacgcggttccgttttgtctaccggagtttgtttcatgcatctcagctctcgggccaatgcgcctgccccgcataaaccttataaccctttttatttacagttgtatttctgggtgatcatcgcgattatcctgggggcgctgttaggccattgttatcctgttgtgggtcagcaactcaagccgttgggggatgcctttatcaagctggtgaagatgattatctcgccagtgatttttctgacaatcgtgaccgggatcgctagcgttgcgcatgtggggacggtggctcgcgtatttggtaaggcgatggtgtatttccttttcttttccacgctagcgttgctgctgggtttggtcgttgctcatgtggtgcatccaggtgtgggcatgaacattaatccagcggatctccatcagggggagatcgcaagttatgtggagaaatcacacgatttgacgttggttggctttttgatggacatcatcccgaagacactgttgagtccgtttgttggggacaatattttgcaggtgttgtttgtggcagtgttgttcggtattgcgttggcgcttgctggggaacgtggtaagccggtgctcaatttactggatgcgttgaccttaccagtattcaagcttgtccagatgttgatgaaaatggctccgatcggtgcattcggagcgattgcgtttacgattggtaagtatggagttgattcattggtgaatttggggtggttggttggctcgttctatctcacttcgctgttgtttgtgttggtgattctgggggcggtgagttggttctctggtttttcgatactgaaactgatccgctacttgaagtcggaactgttgttggtgttgggaacttcatcttcggaggcggcgttgccgtcgctgatggaaaagatggtgcaagcagggtgtaaaaagtcggtggttggattagttgtgccgactggttactcttttaatctggatggcaccaatatttatatgaccttggcagcgttgtttattgctcaggcgaccaacacggagctgacaccagcgcaccaacttgctttgtttttggtggcgatgttgagttctaaaggggcagcgggtgtgtccggtgccggctttatcactttggcagcgacgttgaccgtggtgccggaagtgccgattgcgggcatggcgctaatcctgggggtagatcgttttatgagtgagtgccgttcactgaccaattttattggcaatgcagtggctacgctggtagtttcgcgttgggagaatgcgttgaaccatgagcagctcaaaattgcactggatggcagtgaacctgcataccagtcactacatgctaaggatgctgagccgtctgtgtcgcgttgagtctttagtgagtcatcgcagtgcgtgttgctgcgatggtggtgttatacgctttggggtttgtggtgccgtatgtagcatcggctgtcactgttgagtgacaggtctcgtcattggtatgtaggtagagtgggctcttcctacgcctatttaggtattcaagcgcgatgtcaaacgatacatttaaacaggcggcgatcgattatcactgcacgcagccagccggtaagatcaaggtggtcgcaaccaagccaatgctgacgcagcgtgatttgtcgttggcgtattccccaggtgtggcgtttgcttgccaagcgattgtcgaaaatcctcagcaggcaagtgagctcacggcgcgcggtaacttggtggcggtgatttccaacggcactgcggtgttgggtttggggaacattggtccactggcgggtaagccggtgatggaaggcaagggcgtgctgtttcagaagttcgctggcattgatgtgtttgatatcgagattgacgagtctgacccggataagttggtagacattattgccagtctggagccgactttcggtggtgtgaacttagaggacatcaaagcgccggaatgtttcatcgtcgagcgtaagttgcgtgagcggatgagtattccggtctttcacgatgatcagcacggtactgcgatcattgtcggtgcggctgtgcttaacgcgatggtcatcactggaaagaagatcggagaggtgaagttggcaaccaccggcatgggagcggcgggtgtttcctgcgtcaatatgctggtttcgctggggctgaacccggataacattttggcttacgaccgggagggggtgatccatactggccgtaccgatttggatccggagaagcagcgttatgcacgggatacggataagcgcactttggcggagattgtggagggtgcggacatttttcttggcctttctgctgctggcatcttgacaccagagatggtggcgacgatggcgcctgacccagtgatctttgccttggccaatcccattccggagatcatgcctgaggcggtatgtgcggtgcgtacggatgccattattggaactgggcgttcggattatccaaaccagatcaacaatgttttgtgttttccctacttgttccgtggtgcgttggatgtgggtgcgaccacgatcaatgaggagatgaagattgcttgcgttaaggcgattgctgcgttagcacggtgtgaggcttctgatctgggggctgcttatggtggtgagacgccaagttttggccgggagtatttgattccgcgtccgcttgacccgcgtttattagtggaactgtcttcggcggtggcacaggcggcgatggattctggggtggcgacccgcccgattacagatatgagtgcctaccatgacaagttgagccaatttgtctaccgcaccagcttgatgatgaagccggtttacgatcgcgcgcgcgctgataagcagcgggtggtgtatgccgagggtgaggaagaggtgattctgcgtgcggtgcagaatgtgattgatgaagggttggcgttcccgattttgattggtcgtccggatgtgatcgaaagcaggattcagcgcatgggactgcgcatgaaggccggtgttgatttcgaggtgaccaatatccacgatgatccgcgcttcaacgattattggcagtactaccatggggtgacggagcgtcgtggggtgacggtcagtgcggcgaaggagttgatgcgttcgcgtccgactttgattgcttcggtgatggttgcacgtggggaggccgatgcgttgttgactggagccgtcggtcgtttccataagaggctcggttatgcgcggagtgtgatccctctggaacctcgggtgagttcaacggcggcgatgacaggcgtgattaaccaacatggtgcgtttttctttgtggatacccatgtgcaggaggatccgagtgccgagcagattgccgaggccacgttgcaggcgtgttaccgtttgaaattgtttggcattgagccgagtgtggcattactgtcgcacagtaattttggtagtcacgattcgcgtgatgcattgaagatgcgccaggtgcgcgagctgctgctcaagcgtagccccaggttgaatattgatggggagatgcaggcggatacggcgtgggatgaggtgctgcgcgagcgcattatgcccaataccacgttgaagggccgggctaatttgtttgtgtttccaaatttggaggcggccaatattgcttacaacttggtgcgtgtgtttaccgatggtgtggcgattggcccgattttgatgggtatttccaaggcagtgcatattctgacgagtagcaccacgtcacggcgggtgatgaatatgactgcaatcgctgcggtggatgcgcagattcgcaagcagtttgaaggcggaaagcgcggtggataaatgaaacgacgccgggtgtgatgtagcgtgctgaggcattgatgtttttttgagtgtatttgaggaacgtttttgttcctccactcagcagcgtttgtttgagatcagcggatctaaataaggcttcgtgtgtagcgcctcaaggacaatgcccctgaacattcaggggcattgttggtgtgttgctgcgggcgtgttgctgtgctgcccgttgcatcaatgttgtttttttaggccgatagttccagtaggagtttgttgaggcggcgcacgtagttggccgggtcttttaaactgtctccagcagcgagtgcggcttgatcgaacaggatgtggctcaggtccgcaaaacggtccatgtcttgttcggcgtccagtttttcgatgagtgggtggcttgggttgaattcgaagacgggttttgtttctggaactttctggccgctggcttcgagtaactgacgcatttgcaggccgagatcgccttcgccgatggcgagtactgcgggtgaatcggtcaggcgatgtgagacgcgcacttcggcaacatcttctcccagtgtggctttgatccggctggctaatgcttctttggtttttgcgatttcctcttgtgcttttttgtctgcttcgctgtcgaggtttccgaggtccagatcgccgcgtgcaatgtctacaaaggatttgccgtcgaattcatgtaagtagttcatcaaccactcgtcaatgcggtctaccagtagcagtacttcaatgccttttttacggaatacttccaggtatgggctgtccttgatttgtgcgtaggattctccggtcaggtagtagagcttgtcctgaccttctttcatgcgtgcgatgtaatcggcgagtgcgacggagggatcaccggaggtgtcgtaggttgaggcaaagcgcagcaggctggcgactttctcgcggttgctgtagtcctcggcgggtccttctttcagtacctggccaaagtttttccagaaggttttgtaatcttctggggcgtctttggcgagtttttccagcatgtccagggcgcgtttgctcagtgcggctttcatggagtccacgactgggcccgattggaggatctcgcgggagacgttcagcgagaggtcggcagagtcaacaacgcccttgatgaagcgcaggtagagcggcaggaactgttccgcttgatccatgatgaagacacgttgtacatacagtttcagtcccttggcagcattgcggtggtacaggtcgaatggtgcgcgtgttgggacgtagagtaatgaggtgtattccagcttgccttcgaccttgttatggctccaggcgagcgggttggtcatatcgtgtgagatgtgtttgtagaattcttgatattcctcatccttgatgtcatttttggggcgtgtccatagggcgctggctttgttgacggcttcccactcggcttctttgggggcatctttttcttcctctttgccgtggtgttcctccttgaccatttcaatgggtaggccgatgtggtcggaatattttttcagggtgctgcgcagggtccatccttctgcaaagtgttgctcattttctttcaggtggagcacgacgcgggtgccgcgttggggtttatcaatggtggccacttcaaagttgccttcacctttgctcgaccagtgcacaccctcggctgctgtcagtccggcgcggcgactgtagacgtcgacgtggtcggcgacaataaaggcactgtagaagccgacaccgaattggccaatgagattggcgtctttgcgttgatccccagacagtgttttgaggaaatccgcggtgcctgacttggcaatcgtgcccaggtgtgcaatggcctcatcacggctcatcccaatgccgttgtcatcaatggtgatggtgtgtgcttgtttatcaaactcaacgcggatgcgcaggttgggatcttcttccagtaatgcgggtgcgctcaatgcttcaaagcgcagtttgtcggcagcatcggcagcattggagattaattcgcgtaggaaaatctccttgtttgagtacagggagtggatcatcagttgcagtaactgtttcacttccgtttggaagccgtgggtttgtttgtctgcttcgagggtcatcgttgttaagctccataaaaggtgtgccgcattcgatgcggggatggcgagggggtatgggtcgtcggtgatgctttcaaggcttctggtcagttgggaggtatcattgggtttcttttttggtgtctggttgtcgatgttcatctcttgccatctgttgttttttgtttgctgatgaatcaccgacgtacgtcaccggtgcgcgtctgtggtgaaggacatgtacgcattatcggtggccgttggcggaatacgcgcttgagagtgccggaactgcctgggttacgtccgacagcaagtcgggtacgggaaacgctgttcaattggttgatgccagtgttgccgggggcacatgttctggatttgtttgctgggagcggtgcgttgggattggaggcggtgtcgcgtggtgcggcgagggcggtactggttgaacgtcacgcggagttggtggtgcggttgcgtgagcaggtggcgcggcttggtgctcaggatcaggtggagattgtgcaggctgatgcgttgcagtggttgcaacggcctgctgcggtgcgtttcgatattatctttcttgatccgccgtttgctgctggggtgtgggagacggtggtggtgcgattggcggggcacgtggcggtcgcagcgtggttgtatatggagtctccggttgatatggaaccagtgatgctgccaggttgggagttgcatcgtgacgaccgcacgcgtgaggtgtgctatgcgttgtatcggtatccggctgttacactgcctgttggttccaagtcagtatcgtctgtatgagcgtggttaatcgccgcatcgccgtctatcctggcaccttcgatccgatcacgaatggtcacattgatttagtgagtcgtgctgctccgctgtttgagtcgattgtggttggtgttgcgcagagtccatccaagggaccttcgctgccgttgcagcagcgtgtggctctggcgcgtgaggcgttgtgccagcatgaaaatgtgcaggtcattgggtttgatacattgttagcgcattttgtgcgtcacgttggcgcgggtgtgttgctgcgcggcttgcgtgcggtttcggatttcgagtatgagttccagatggcgagtatgaatcgtcatctgatccctgaagttgagacattgtttctgactccggcggagcagcatagttttatttcgtcttcgctggtgcgtgagattgcgcggcttggcggagatgtttccggctttgcacctgcggcggtcgttgcggcgttacgtcagaatctttaggggcacacgatgtttttctgttttatccataatccgtaagggaagagcaatgaataacatgttgcgtgtggtggttgcttcgtttgtttttgttttggccgcttgtggtcagaaggcagctcaaacggcggcggatgttgcttcttcagtgccgattgttccggcgaaggatgataatgctgcttggaagacgtatcttggccaggttgtttccaatcagctgggcaatagtaccggtagtccgtttttgtactatttgccgccggcgtctgatcctgatttcaaaggcaagtatgatcgccagttagagaatgtcacgagtgcgttggggcgtggggtgcagccggggacgctggtggtgtttggttcttcggcgtcggccaagatggccgatttgattgtggctgcgttcaataaggtgcaggccggttcgatgaagggagtgcatgtgcttttcattgggatgagtgctgacaatgctcgcgtgcaaaaagtggtgcagcccagtggggctgagtatgtttttgtcgaagcaaaatgaggcagcaggtgttgctgggagcaggcagatgcgtgcttgcgtctttatggatatccccgtcatggcgttagcttcgatggcttgtttgctgggattcctgttttttagcggtggtggttgcgtgatgttgctgtggatgatgtggttggccttttctttgagacatctgtgatgtcgttaaggattaatgcgttgtgcgttaattgcgatgtatgtgagccggtctgtccgaatcgggcgatttcgatgggggagacgatctacatcattgatccgctgcgctgtaccgagtgtgttggtcattacgatgagccgcaatgcgtggttgtttgcccggtggagtgtatcgatccagatcctggtctcttggaaacgcgggagcaactgcttagtaagttgcagcagttgcaacgcaacgatcccgagttgtatgaaaaggaatctcctgatttatgagtttatttcctcgttgtttcttgttgctctgcgtttttttctcgcacgtctctgcagagcagagagaggtaggactgttacgggagggagtcgccagagtcccgcctggtgcagtgattgccagtagtcattatttggcgacggatgctgggctggagattttgagacagggtgggaatgctttcgatgctgcagtggcggtgtcttccacgctgtcggtggttgaacccattagttctggtttgggcggcggtggcttttttctgcttcatgatgccaagacggggcatgatgtcatgctggatgcgcgggaatacgcgccggcgtcggtcaatctgggtacgtttctaaacaaggatggtcaactggatcatgaccgttcgatcaacgggccttggtcggcaggtatcccggggttaccggcagcacttgttgagctggctgagcactatggcaagttgccattgagacagacattggcaccggcaatccgtattgcgtctgcggggtttcctgtgtacaggcgtatggtggaggggtatcgggcgcgccgtgaagtgatggagcgttatccagggacgcgtgaagtctatctgcgtggcggtaagccgatggatgagggtgatattttcaaacagccagaattggcgcggactttgtcgttattggccaataaggggtttgatggtttttataagggtgagactgcgcagcggttgctggctggggtgaatcgggcggggggacgttggactgctgaggatttggccggttatcgggtcaagtcgcgtgttcccatcacgttcgattatcgggggtggaagatcaccactgcgccgccgccgtcttctggcggtatcgcgttggcggaaatgttacagatcttggaaggttgggatctgaatcggctagatgatgtgcatcgcgttcatttggtggtagaagcgatgcgccgtgcgtatcgggatcgtacgttttttctcggtgatcccgattttgtgtcgattccgcagcgtgtgttgacgagtcaggactatgcgcgtggtttgcgtgctgcgattaaccctgagaaggcaatgcctagcgtgctgttatcaggtcatccgacgccattggaggatgaggagacgacgcatttttcaatcattgatgcggaaggaaaccgggtgggtgcgacgcagacggttaatttgctatacggttcggggctgattccaaagggaacaggtgtgttgcttaacaatgagatggatgattttgcactccagccaggcgtaccgaatgtgttcggggtgatgggctacgaggcgaatgcaccaaagccagagaagcgcatgctcagctcgatgacgccgactttcctagaatctgccgataaagtggcggtgattggcacgcctggcggcagtcgtattatcacaatggtgctgttggggatcttgggttacgacgctggattggacgcgcaacaggttgctgcgttgccgcggtatcaccaccaatggttgccggacgtcattgagacggaggcggctacgtttccggcagaggtgatcaagggattggagacgatggggcatacgatcaagcagccaagcgatacgattgccggtgggcgtggttccagccacgtttggggcaatgtgcagacggttgaatgggatcgtcgttctaatgtgctcattggcggtcatgatccgcgtcatgttgtgggcaaagcggccgtttggctcacggataaagcggttgttctgccgcctacggaccatttgcctacgccgtgcttgcaggattgccatgcgcaatgatcgaattcggcaggcatccgttgattaatgagcaatgcagcgtatggccgtcgtttgagtgccatacgcaggttgtgatggtgtgatgtgtattcggtaaatatattgaagcgatatgttcatcgtttgcctcgttgtgtttctcgaaaatatttaacttccgaacttggtttttctgcttgtgccgcatattttacttagattaatcatgttattttttcgatagaaatatattattttctataaacaaacttggtttatggtcgatgtgcgtttcttgcgagacggggttgaagggcgatctgttcgacagatgtaatgtggttaactgatattattttgagatattcatcgtgtgaatattaattaataaattttccataaaaattctcagtaaccaactaacagtattcttgggaagatagcttttttataaagaacgttattcaattgttaggctgtcagcatgtctttccatcaatccatcatgcattttcaccaatgccagcgatctcgagcacactgttttctaacagttggttaatcaatacagacacaggatgaggacgtgctattggtttgtatctcaatccggtgttatcaagcaaatcaggtgatgaattaacgtgttcctcaaagaggatcacacgtggtaatcaaaggtcatccaggcgtgaataaattcaaaaaattgcaatccatcctgaggcggacatcacacagcatgaaggtatcggagattatccattgcatcttaagtgtgtggaggcaaagagagattgcagggtgggcgatgcactttggtttatgggaccttccaggtcagtcactttctcagtgatgccgttgttgggagctgctaagagaatgaagcgtcagcttggttattttctgttgagaggtgtgttgttgtggctgtgcttggcggcaccagcagttgcgcagtcgctgatgctggaacgcttggatgacgacccgccagcacacgaggtgttggcgggtgtatacgacgctatgttgcgcccaaatgacacagggggtgccagtatctatgaaacggcgcgacatccggtgtggtggcgtattcgcgctgaccgccagatcagtgcagctgggcaaccaaagttgcagatagagttcccgtatctgaattgggttgaggcttgggtccctgggcgtagcgtgccgagccgccatgcgatctacggagctgcggcggaccgccgttatgcaacgcgtgcattggtgatcgatttacccgaggggttgccgcaggggagggcagtatggttgcgtgtgcatgcgcagagcacaataccgatgccggtttcgattgtgagcaatgatgtggtgcatcgtcgtgatctggatcatgttgcttggtatacctttattctcggtttaacgacggtgctggccgtgctttcagcctcactctggatgcggttgcgtgagcctgtgtatggctactttacggtcaatttggtgtgtgtattgctgtacctgattggctttgatggcgaggcgagaggttttccggtgctcggagaattgtttggatcttcacctgtaccgatacgggtggttgctacctttggtggctttgtcatcgtgaatttccagcgtcactacttgaacaccgcgttccggataccacgggtggatttggtgttgaaaggttctgcgggttggttactggtgatggcagtgttgaacgtggtgccgcagatccagccatatccggtactcacgtatctttctctgatcgctgcgtcgctgctgctgttgtttagttgtgcatggttaggaggcgtccgtggtcatcgcgatgcttggtcgttgttggttgcttggacccctttgttattgttctctatgctgcgcagcttggagttgattggctggaatcggttgagtggcaatggcgcttggattggatatgggctgagcatgtcgctggcattatcttgtttgctggtgactctggtactggctgatcatatgctggagttgcgacgtgatcgcgaccgtgccagattgcttgcaaatgtggatggtctgaccggtgcgttgacccgggtcgcgattgagcggagattggaacgcgatattgatgatgcccgtcagatggggacacctttatcggtggcgtttatcgacattgatcatttcaaacgtatcaacgacgaatatgggcatgctgctggagatgcttgtttgcgtcaggtggtgcagcgggtgcgcggttggctacgtgccagtgacgcgcttgggcgtcatggaggtgatgagttaattgcgatccttcctggggccgacttggcagcagcgcggcgtgtcgccgaggggatccgcatcgctgtttcaagccagccgttccaatttgaatgcacccggttacgttgcacattgagtcttggggtggcctcgtggttgcccgatgaatccatcgaagcactattgcaacgtgccgataacgggttgtatgcaagcaaggcggctggacgtgatcgggtcagtacggagatgtaaaaaggaaaaggggcatccattgtgtcggtgccccgttcgatacattgccagattgagtgaatgtgctgttgtggagtggttgtgtcaggtcgcgaatgtctagcgggtgcgttcgagcactaacaatggatcaatacgcacgttgaaccagttcatcccccaatgtaaatgcggtccggtggctcgcccggttgcaccgactgcaccgatgacttgaccttgatccacgtgatcgccaacttttacatcaatccgtgataggtgcagaaagttggagctgactccagcgccatggtccaacaacactgtgccgcctgtcaggtacaaatctggtgcggcgaaggtgatcacaccagccgctggtgcctttaccggtgtcccggttgctgtggcgatgtccatccctgagtgcccgttgcctgcagtttgaccgttgtagatgcgtgcgctgccgaaacgtccgctgattcggccttgtacaggccagataaaggcttgggcgaaatccgagcgatcgtcgttgcgctggcgtgcatcagtgatttgtgcttgttcacgggtgatccgtgcagcaatttctggtggtggattgactgtttttggcggcacgccgttgaccacctcaagcggccattggcgtgttgtcacggtgatgttgacttgtttgacggtcccttctggggattggatacgtagtatcagtggtccgatgttgttacggcctacaccaaagacaacctgacccttgtcatcgacgcgcaacacctgtccgctgtactcgactcggctgcctgctgggacggtcccgatcaccagtgcgccctgggatacattggtgggaaactcagagcgggtttcttgtgtgtttgtcttgttcttggcatatgtaatgggcggtaaagtcagtgtgaccaacataccgagcgcgagtaacctattcacagtgagtgcaagcatcagcggtcaaattccagacgttggccgttcggtacgccaacaaggcggttaccgtcccacacatggtggccgttgacccacgtggaagcgatacgagaacgaaatgtggtgccttcgaatggcgaccagccacatttagaaaggatttcctgacgtttgacagtgaatggtgtgtcttcgaccagtaccaagtccgcccagtagccctcgcgcaggaaaccacgtccagtcacgtcaaacagttgtgccggtgcatgggcaaacttgcgcacgatctcagttaccgataaccgaccggcatgcaccagttccagtgctgcgacgagcgcgtactggaccaatggcaggccggagggagcttgtgcgtatggttgctgtttctcttcccaggtgtgcggtgcatgatcggtggcgaggacgtcgatcacgtcctttgctaaagcggcgatcagtgcttcgcggtcgctgacttccttgatggctgggttgcacttgatcaggttgccaaggcgtgcatagtccatgcgatcaaaatgtaggaaatggatacaggtttcggcggtgatttgcttgcgtcgtttgccggcggcatcgaccagcgggccagcttcaaacagtctcagctcatcagcggtagaaatatggagtacgtgcagccgggtgccgtttttctttgccagcgatacggctagttgcgaggatttcaagcaggcttggcgcgagcggatgtccgggtgttgctcggcactcagcgtatcgccgtagcgagactggtacttggccagtgttgcgttgatggtcggtgtgtcctcgcagtgggtgatgatcggggtgggtgcatcgcggaaaatcccttccagcgtggcttcattgtccaccagcatgttgcctgtggaggcccccatgaatactttgatgcctggactggttttggggtccagtgcctggattgcggcaagattatcgttgctggcgccgaggtagaaaccatagttgccccaggcacggccgcttgcagcgtcgtacttggcctgcaatgcagcaacgtctaatgtcggcggattggtgttgggcatatccataaagctcgtcagtccaccggccactgcagcggcggattcgctggcaatatcgcccttgtgggtgagtccaggttcgcgaaaatggacttggtcgtcgatcatgcctggcagtaaacggcggcccgctgcatcaatgacgatgtccttactttgtgcagacagtccggtgtcgatacgggcgatgcgtccgttctcgatcctcaaatcgctgtcgaattcgcggccttcattgaccaagcgggcgttcacgatcaaggttggattcattggtggtgtcctgtacagcgatgagaagggggattgacctgtgtgctgatgttgtcgggtaccggatcgtagccacccggttgcaagggctggcagcgtgccagccgacgtgctgccagccatatgccgcgcagcgtgccgaagcgggcaatagcccccattgcgtattcagagcagcttggttcgaaacggcaatgcgggcctaacagtgggctgataagacgcttgtaaatcttgagcagaaggatgagtgggtgcatgatggctttgtgcacgcgattggatgaacacgtggttgattggttagggcaggtaggctataaagagccgctttcccaggtcccagggagtcaaggaagcgtgtttcgtggctgctaaaaaaattgtaaagaagattgttccggttgtttccaacactgccaagcccattggcaagaaagcggctgttgttgctgataagaaactgcctgccaagagtgcctctccgtctgccgggaagaaacgaccggccactaagaaagtgcctgtgaataaaactgttgccaataaagatgctcaggtcaagcttttgccaggtcatcctataaataaggtcgctaaatctgtgctgaagtcggcaagtaaacctaaatccctgactgcagagtccgtgccgatcggcaataacgctgctcctgcggttgcgacaattgcgatgaagtccgagtctacgtctgccaagaatcaggcgcttatttcgaaatcttcagcgaagacgcctgctaagtttgattcttccaccaaaccgagtgcctcgcgttcggcagggaaggtggctgttgcagtgactggcgaaactctgcctcgcgtgtcaaagacgaaatataaagtcgttaaatataatgtcgatgaggcgaccggtcgtcccatattgccgttgggttacaagccctcctcagaagaggagtatatgaatccgctgcatcaggagtatttccgccagcgtttagagcaatggcgtaaggatcttgtcgaagagtctaagcagaccatcgaaaatctgcgcgatgaggtacgtgatattggtgatgaggccgagcgtgcgacccgtgaaacggagaattcgttggaactgcgtacccgtgatcgttaccgtaagttgattgctaagatcgatagcaccctcaatcgcttggaaattaacgattacggctactgtgtggataccggcgaggagatcggcttggagcggcttgatgcgcgtctcactgccgagcgtacgattgatgcgcaagagcgttgggaacacctacaaaagcagcagggcgattaaacacaggttgtttccagtgtctggtttgccacgcgctatgacatcaatcactacatttggttcagcgcgtggctatttctcttgcttccggtggtgccacattcttcaggagtgtgccttctttcgtcttaacataattgttgttccaccgaaggtcgtgtgttgtgactaagtccagcagacgaccgtggtcatggttgttggggatcctggctttcctcgggttagtgttcgtactcggcccgcgtacttctaccaccttgccaccgattgttccggtgagtgttccgaatcatcccaacacgctgacccaatggttggcacaacgtgaaggtgcagcgggtcagctgcgctcggacacacaggcgcatattgtctgggccgatccgttgcatccggcgcgtgccgattgtgcgatggtctatctgcatggcttcaccgcaagtcagggggaaggtgctccccttcatgttaagttggctcgagcatttggatgtaatttgtatttgcctcggttcccagggcacggcctgcaggcgatggatgcactccgtggtattgatgccgtacaactgcgtcaggctgctgctgaagcccttgccgtggcccgtgtgctgggcgagcgcgttgtagtgattggtacctccatggggggagcactggctacccaggctgtggctgctgacccagggcaagtccagacactggtgttgtggtccccgttggtgcgtgagcgtgacgaacagttacgtgtattgggatggccttggggcagccaattactgctttgggtcaaaaacagcggtgacccagtgatgcgttttccagttaaaagccattactgggctggtgggtcgcatttggatggctatcgtgccttgtatgcactgagccgtggcgggatgcagccgtccgtgtatgcgcaggtacgggtgccggtgtttgtcggttactactaccacgatgcgcaccatcaggatacggtcgtctcggtcgatgccatacgtacgatgtttacccaattggggacgccgccagcacagcgtcagctactggcatttgcgcaggcaggtgaccacgtgatcgcctcgccattgcgttccaatgccgctccccaagtgttcatggccacctgtcgcttcattgctactcatggcggcctacgcttcgctcccaccatctcagactgtgaacatgcttgggaacactagcactgggtgtctaggaatcgctgcttgctttcttaactaatggcgtcatacgtacagagaacccgtctgtcgaacgtgatcaacatcaccgtccgctctgccgcctcccagaatatcgaccaactgcccgatcagtgctggcacaaaagggcagaacatcgaccatgccacatcattagcttgttacagatcgcgtagatccaactggcgtaaccgcggtgccttcagtgccgtgatgccaacgacaaccaacgtcatgaagccgcccagaaccaccgcgtgtaccaggccgataaaacgtgccatgactccgtcatagaatgcgcccagctcattagacgaaccaatgaagatgctattgattgacgagacccttccgcgcatctcatctggtgtgaccaattgcaggattgacgcgcgcaagacgacagaaatcccgtcgcaggccccataaaccagaagtatccccgctgacacccaaaagtgttgggacagaccgaacgcgatcgtacatatcccgaatccggcgactgccagcaataatgtgcgtcctgcgtgacgttgtagcggataccttgccagccatagccccgccagtactgaacccagcgccggcgtgccacgcaaaatgcccagaccctccggaccatagtgaaaaatatcctggatgaacgccggcagcatcgacacggcaccccccaacagcacggagaacatgtccagcgccatcgcaccaagcatgatctgattggagaacacaaagcgcaggccttcggcgatgctgcccaatacgggggcacgtggtttatcgactgcgggttcttcaacccgcagcagtgccagtgcaagcagcgcgatgatggatgcgactactccggcagcataagccagtcctttgccgcccaaagcgatcaagatgcctcccagcatgggactgaggactaaactagcctggaacaccacagtgccaagtccagcaccacgtgcatagtcttctcgtgccagcacacgtgcaaacagcgcgttgtacaccgggacgatgaaagaacgcaccatgccactcaaactggccgcaacgtagattggccaagtagtctgtactggtgccgttactggggccgtgttgaatgcggctatcagtaaaattgttggagtcattgccaagccgagacttgcgaacattcccagccgacgccgtggtagatggtcgaccaaataaccagcgaatggagcgatgcagaaaaacggaagaatctcagccagagcgaccagaccgagtaaaagcgggttacgcgtgatctcgtaaatatgccagccgatcgtcacggacacgatttggtaagacagcgttgcagcgatgcgataggccagcaccgccgtgaaaccaggatggcatagcagcgtgcgcagcgttgcgctggaggcaggtgatgtactcatgcgttaagtgcttgcgctgtattgcgaatcaggtcgagcattgctgctacaccattattgcgtgttggcgacaggtgtttggcgaggccgatatcggcgatgtaactgggggaagtctttagtatttcggcggcactgcgtccggagtaaacgcgcaacgccagatagatcagaccggagacaatggccgaatcactggcgccatagaacttgagatcatcgttattgccttcagacacaatccagaccatggactggcagccgtgcagacggtgctcctccgtcttccaactttcgggaaatactgggagcttgcgtcccaagtcgatcagatactgatagcgttccgaccagttgccgaagaaggaaaattcctcggcaatggcttcttgcgccgctgccgcggtggattccagtggaaatgaatcatcggtcatggtcttgaacaggatgactccgtgtacggtgacggtagggcgagtgtatcagcgtgattgccgtagatagtcagatccacacctttacgtgtgctgcttcatccagcgtaccccatgcggcgtatcctcaagcacaataccctctgcggccagttgtgcacggattgcgtcggcacggacaaaatcccgcgcctgcttggcggcaccgcgtgcatcaatcagcgcctggatatgcgtttcatcgctctcgttggtaccttggctgaaccatgcctccggcgtttgctgcagcagaccaagagccagtccggcgccaagcaactcggctttcagccgggtgagcgcggcggtgacctcagctgctgcgtgatgtgtggtgtcagccaattggatgcgtgcctcgtttgccagcgttgccaactcggccagcgcctgcggcgtgttgagatcgtcatccaacgctgcttcgatattccctgggataaaggggtgcgccggatacgccgctaaatcgcgcagcgtcccatacagccggttgagagtgcgtaccgactgcgcgatgagtgcctctgaccagtccagcggtttccgataatgtgccgacagcagcgcgtaacgtagtgcttcgggaggatgctttgccaccaacccatgcacggtctcgatattgcccagcgatttgctcattttggcgccttcaaaattgagcatcccgttgtgcatccagacccgtgcgaacgtactgctgccgtgtgcgcagcgactttgtgcgatttcattttcatgatgtgggaattgcagatcgatcccgccagcgtggatatcaatcgtctcccccagatgcgcagcggccattgcggagcactcaatatgccagccggggcggccgcgcccccagggcgagtcccagccaggaagctgatcgctggaaggtttccacagcacgaaatcgcttgggtcacgcttgtatggagcgatctcgacccgagcaccggccaacatctcttccggatcccggcgcgacagttgcccataatcggcaaagctgttcaccgcgaacagcacatgctccatcgcgacatatgcatgctggcgttcgatcagctgttcgatcatcgcgatgatctgtggcatatgcgcagtggcttccggctcgatatcaggcggctccacaccgagttttttcatatcctcacggtaagcagcgcagaagcgttcagtaatggccgagatgggaacaccctgctcctgcgcagcagtgttgatcttgtcatccacgtcagtgatgttgcgtgcgtagcgcagcgccccataccgccgccgcagcagcgcggccaacaccccaaacacgactggaccgcgggcgttgccgatatgcacatagttgtagacggtcggaccgcatacatacatagttgggcaggcagggtccagcggttcgaacggctcgactctccggtgaagggtgttgtaaaggtgcaggctcatcacagaccatcctaggagcaatctcggattctagcgcctgagaccgtatcttgatgctttggttcatacttgagactgtgattggctgccagaaggggtgtgttcagccccctgacaggttccgtctctacactacgttccgctgaatacacgcttgaatgggattgatgcgccttccatcgttatttttgacatgctgcgtattggcatcttttgtgatgccttcttgggcagcccatccacggagggccgatctgaaaaatgtggggatcgtcggcaacgtcaaatttgattacgcccaggtgatgaaggtcgagcctgtctatcagacttggcatgccagccatgttgaagaacagtgcgatcccttaccatttgctgaggttgcccccgaattagacccgggtcatgacaaacatcggaaaatttcgcggatcatggagttggtaaaaggttttttttccaaccaccacacagaacaagcactgccgggcacttcaaccaattcccagcgtaactgccgtatcgttgaggtgccgcgtcaatttcgccgtccgattgcctatgatgttgactacatttacaagggcaccaaatatcgttcgcgactccctgaggatccaggtaaccgcttagcggtgcgtgtcctggtgacaccttacctttccgaacacaacttccccccgccccgttgaaaccaatgccctgtttcccaggcatggtgcgacacagcggtagtcctgagcctactaatgcatcgtccccgttggagttgcattggcaccccgtgcatggcaccatgcttgccccctatacaaatgaacgtcactatggcgccctcatccgtgcccgcttgtattccagtttgacctttcgtgtccatttgttacaggtcagcattcttcaatgcataggtgatttgcggagcgttttttcattccctttaaaaaatcctggccagcgaagctggattttttctttttgatgtttgccacagtttaagtgattaaaaatacgacgcattctgtgtgtgtcccctagctttattttgcggcgacacttcctattgcaaaggatcgaacgatggccttgaaacactttttgaatacccaggactggagttgctctgaacttaatgcactgctgacccaagcacgcgcgttcaagcacaacaaactggggaacggcctgaagggcaagtccatcgccttagtatttttcaacgcatccatgcgtacccgcagcagctttgaactgggagcatttcagttgggcggtcacgccatcgtcttgcagcctggcaaagatgcctggccgatcgagttcgataccggcaccgtgatggaagcagagaccgaagaacacatctgcgaagttgccagagtcctgggtcactacgttgacctcatcggcgtgcgtgcgttcccgaaatttttagactggacttacgaccgccaggacatcgtactcaacggctttgccaaatattccccagtgccggtgatcaacatggagacaatcacccatccctgccaggaactggcgcatatcatggccttgcaggagcactttggcaccacagacttgcgcggcaaaaagtacgtattgacctggacctatcaccccaaaccgttgaatacggccgtggccaattccgcactgaccatcgcgactcgcttgggcatggatgtcaccctactgtgcccaaccccggattacgtccttgatgagcgttacattgattgggcacagcagaacattgcagacactggcagcacctttcaagtgagccacgacatcgacaacgcctaccgtggtgccgatgtgatctacgccaagagttggggcgcactcccgttctttggcaactgggccatggaaaaaccgatacgcgaccaatacagacactttatcgttgacgaagccaaaatggcgttgaccaacaacgccgtcttctcgcattgcttaccactgcgccgtaacgtcaaggcgaccgatgcagtgatggatggacctaactgcattgccatccatgaagctggcaaccgcctgcatgtacaaaaggccatcatggccgcactcgcttcccaataattcacgctatatttttttggaacttcccccatgagtaagaaaaacattgtcttggccttctccggtggactcgacaccagcttttgcatcccctacctgaaagaacagggctatgccgtacacaccgtatttgccgacaccggcggtgttaacgaagaggagcgcgacttcattgaaaaacgtgctgccgaattaggcgtggccagccacctcaccgtggatggcggccctgccatctgggatggtttcgtaaaacagcttgtctggactggcgaaacctaccaaggccagtaccccttacttgtttctgatcgctatttaattgtggatgccgtactacagcgtgccgatgcactgggcacctgcgccgttgcccatgggtgtactggcatggggaacgaccaagtccgcttcgacctggcgatcaaagcacagggcaactacaccatcattgccccgattcgggaaatccagaaagagcacacccagacccgtctctacgaacaaaaatacctagaagaacgcggctttggcgtccgtgccaaacagaaaaactacaccatcaatgaaaacctcctgggcatcaccctgtctggtggcgagatcgacaaatgggaagccccgggagaaggtgcccgtggctggtgcgccccgcgcagcgcctggcccgccgatcccctcacggtggctatcaaattcgttgaaggcgaagccgtcgccgtagatggaaaacccctttccggccctcagattctgatgaaactcaacaaactcttcgcctcctatggcgtgggacgcggtatttacaccggcgataccgtcattggcctaaaaggccgcatcgtatacgaagcccctggactcaccgcactgctgaccgcccaccgcgccctggaagacgccgtgttgaccaaacaacagaaccgcttcaaaccgcacatagcccgtaaatgggttgaactggtgtacgaaggatttttccatgaccccttgaagaccgacctagagaccttcttaaaatcctcccaagctaacgtgaatggtgaaatcgtccttgaaacccgaggtggtcgagtcgatgccgtcgcagtacgctcaccgcacatcctcactagcaaaggcgtcacctacgcccaaaccgctgactggggtattgaagaagccgaaggatttatcaaactctttggcatgagctccaccctatacgcccaggtaaatcgttccctgcgctcatgaccgttactgcctttttaaaccacgccctcccactgcgcccattgccccacatcatgatgaaggccgacgcatgagcgcgttgctcgactccaccctagatcaccttgagcaactggtatccttcgatacccgcaaccccccccgcgccatcacgaccgacggcattttctcctatgtgaaagcccacctcccgggcttccagattgaaatgaccgatcatggcgccggtgccgtcagcctctatgcagtgcgtggcacccccaacatcctattcaacgtccacctagataccgtccccgactcccccacatggagcgctgacccacatgtgatgcgccgtgccgtggatcgcgtcatcggattaggcgtctgcgacatcaaaggcgctgccgccgccctattggccgccgtccaagccactgatggccccgctgccctcctattcacctctgacgaagaagccaacgacccgcgcggcgttgccgccttcctaaaacgcaatatcccgtatcacgccgtcttagtggccgaaccgaccatgagtcaagctgtgctagcccatcgtggcatcagcgccgtcctgatgaaattcaccggccgcgccggtcatgcctccaccgaacaacaaccccaagccaacgccctccaccaagcgatgcgctggggcgtccgtgcccttgattacaccgcctcattggcacatacccacttcggtggactgaccggactgcgtttcaacatcggacgcctcgaaggaggcatcaaagccaacatcattgcaccgactgccgaactacgctttggcctccgccccctcccatcaatggatgtggatcaactcctggccgcattggccgcattggccgtaccggcgcccgccacctttgaagaaacattccgcggcccaagcttaccctggggcggcattgctactgccgaagcccgtcgcctctccgcccgtgatattgctgatgcattgcacttgccgattggtaacgccgtggacttctggacagaagcctcactcttttccgcctgcggctacactgcgctcgtttacggaccgggcgacattgcccaagcccacaccgctgacgaattcgtcaccctccagcaattgcaacgctacgccgaatccatttaccgcatcatcaatgccacctaacccccggcatcgctaattatttggtcctcccgggcgcgtccgtcccccaaccaccgccaatccaatgcacgccaacctacagactcgacagatcatcatccgcctgctgtcaagcatggcgagcaccaaggaaatcagccaatacctcaagcgattctcccaattggatgcaaaacgctttgctgtcgtcaaagttggtggcgccgtgctgcgcgacgatgtggacgcactgacctcctccctctcattcctccaagaggtgggactcaccccgattgtcctgcacggcgccggtccccaattggacgaagaactcactgcggctggcattcaaaaaaagaccgtcaacggcttccgtgtcaccttgccagagacaatggccatcgtccgcaaagtgtttcatacctccaacctccaactcatcgaagcattacagcgcaacggcgcccgcgccacctccatcaccggcggagtatttgaagcacactaccttgaccaagaaacctacggccttgtgggtgaaatctccgccgtcaacctcgcaccgattgaggcgagcttgcgtgccgcctctattcccgtcattgccagcctcggcgaaacccccagcggacaaattctcaacatcaatgccgatgttgccgccaatgaactcgtacacgtcctccagccctacaaaatcatctttctcaccgggacgggcggtttacttgatgccgatggaaaaatcattaactcaatcaacctatccaccgaatacgaacaactcatccagcagccctgggtctatggcggcatgaaactcaagatcgaacagatcaaacacctcctggaccgactgcccctagaatcctcagtctccattacccgccctgccgaccttgccaaagaactgtttacccacaaaggctccggcaccctggtacgccgtggcgaacgagtcatccgcgccaccacatggaaagacctagacctcccgcgcctccaacacctcatccaatccagcttcaggcgtaccctgatcccccattacttcgaaactacccccttactgcgcgcctatgtcagcgaaaactaccgcgctgccgtgatcctgaccaagctgggcaacgtcccatacctagataaattcgccgtattggacgacgcacagggagaaggcctcggccgtgccgtctggagcatcatgcgcgaagaaacaccccaactcttctggcgttcccgccacaacaaccaagccaatgctttttactacgccgaatccgatggctactacaaacaagaccactggaaaatcttttggaatggcctacatcacttccaacagatccaacaatgcgtcgcccactgcgcccaacatcccccaaccctgatcgattgaagatgagcaccgccaccttcacccttggcattgttggcgcccgcggctacaccggcgccgcattgatcaccctccttactgcccaccccgcgattgaactcatctttgtttcctcgcgtgaataccatggccaacccgttgccgcccacaaccccacctaccgcggtgatctgcgttttgaaacccttgacccggctgccgttgctgccaaacgtgccgatgtcgtcatcctcgccctacccaatggcaacgccgccccttacgtacacgccattgatgccaccgcaccccccaccctcatcatcgacctatccgcagatacccgctttgacccagactggtactacggcctccccgaactgacccgacacacctacaccggacagaaacgcatcagcaacccaggctgctacgccaccgcaatgcaactcgccatcgccccccttcgcgaccaactggctggccccccacagtgctttggcgtctccggctactccggtgctggcaccaccccctcagacaaaaacaaccaagccctactgcgtgacaacctcatgccatacgcacttaccgaccacctgcatgaacgtgaagttagcgcccaacttggtatccccgtcgaattcatgccccatgtcgccccccactttcgcggcatcaccctcaccgccaacctctggttacaacgccccctgacccgagaacacatcaagatcctctacgcaacccgttatgccaacgacccactgatcgacatcatcgacccccccccctgggttaaccagattgccgcccgccataccgtacagatcggcgccttcaccatggcactcggcaacaaacgcgtggtggtggttgccaccttagataacctcctcaaaggagcggccacccaagccctacagaacctcaaccgcgcacttggcctggacgaactgaccgccattccctaccaccccaaaccccccacatccccgctaccctcatcaccccttgcatcatgaccacccccgccttcccgatggacaccccccccatgccctccctgctctggcacaaacccggcgtggcgatcgacgccaacatccaaaccttcctggcagccgatgatgtccttctggaccgcgaattcttcctctacgacatcacagccagcacagcccatgcccaagcattacagcgcatcggcctcctcacccccgacgaactcgacaacatcctccgagaactgcaacacctcaccgacgaataccgcaacggcaccttcctcctagatacacagtacgaagacggccactccgccattgaatcccgcttgaccgaacgcctcggagagaccggacgcaaaattcacaccggtcgcagccgcaacgaccaaatcctagtcgccacccgcctatggctgaaagaccgactcacccaactgagcaccttgaaccgtgacattgcccaccatgcattacagcgtgccgcggccgaacaacacctccccatgcctggctacacccacctgcagcgcgccgttgtctcatcggccggcatgtggtgggccggctgggctgaatccttcatcgacaacgctgtacgcgccgccgatacccacgccctgatcgactgcaaccccctcggcaccgccgccggctatggcgtcaacctccccctggatcgcccccacaccaccgctgcactgggctttgcacgcctccaggtcaaccccatctgcgcccaactttcccgcggcaaatttgaactggccgcactcgaagcactcggcagcgccaccttagacctccgccgtatcgcctgggatctctccctatttaccaccagcgaatttgcattcatcaccctgccgcccgaatacagcaccggcagctccatcatgcccaacaaacgcaacccagacgtcatcgaactcatgcgcgccacccatgccagcgttgccgccgcccgcaccgaaatcgaacaactcctctccctcccgtccggctaccatcgcgaccttcagaacagtaaaggcgccatcgtccgcggcttcaaacgcggcctggccgccttagaactcttacccgcactcctgtcccgcctacagtggcgcccagacaccctccgtgccgccattgatcccggcatgtatgccaccgatgccgctattgaagccgcaatcgccggcatccccttccgtgacgcctaccagatggccgccaaaaccgctgacaccgccgcccaaggtcgcaccccagaaaccagcctcaccgcacgccgctcccccggcgctgccgctgatttatgcctggagaccctccgtgcccgttggcacaccttgacccaacccacctccgacccagacccgcggtgaaccaccgcctccccgattcccatcacccctcccacacacaccaacccatcccctccctgacccccacagcgactgctcattcccccgcccatgcctcccgtccatccctgcaactgcaactgaccccgtctccccatgaccggcacccctcccccctcccgcttccccgaacaacccatccccccgtggcgccgcgctgtcctcaaagtgggcagcagcctcctcgccgccgctggcggcggcctctccccccgctttgccttggatttagcacacttcgtctccgccaacatcaccgccggacgccaactggtcatcgtctcctctggcgctgtcgccgctggccgtgccctgatacccccactgcccgaatccggcggcgccctcgccgcacgccaagccttagccgcccttggacaagcacaactcatcgcactgtggcaacgcttcttcgaccgccccgttgcccaggtcctcctgacccatgacgacctccgcaaccgccgccgctacctcaacgcacgtgccacattgcgtgaactactgcacctgggcaccttgcccgtcgtcaacgaaaacgacaccgtctccgtcgatgaactcaaactgggcgacaacgacaacctggcagccattgttgccgcactgattgatgcccaagccctgtttatcgccaccgatattgacggcttatacaccaccgacccacgccaccatcccgacgcacagcccctgcatgaagtccgcaccctgacccctgaacacctcgccatggctggtgacagcagcagcaccgttggcaccggcggcatgcgtaccaaactcgaagccgcacttaaagccggcgccgctggcattgacacctacctatttaacggccgcagcagcgacgttgtccgcggactcgcacaacaccgcctccgcggcacccgcatccatcccacctgtaccccgattgccgcccgtaaatattggttgcgtcacgccccagtcgagcctggcgcgatcctcatcgatgccggtgccgccgccgccttggcacaacaaggcgcttccctacttccgggcggcgttttgagtgccgaaggcgacttccgccgcggcgatatgatccagatagccacccgcagcccagatcaccccccacaccccctggcacgcggacttgtccaatactcagccgccgatgtccgccgcattgccggttgccattcccgcgatattcagcccctccttggatacacctatggcgacaccatcgttcaccgtgatgacctcgtcctcctctgaccgccccccactcttgcaaccatcaccaccatcaaataaatagcgaaccgcaaccgatgacctcccgatagcccccctaccattgcaccccctgcctactacaaccgtcgatgccccccgcctgcagaacatatcccaccgtttgccttctcaccccctgagcacatccagcacagcaaccacccatcccccccaccatctcctcacatctcagcccctgcgctgccccgtgccacactgccaacaccccccgccaacacctatccccttgcacccacggccctacctgatgtcccacatccgacaccttgcccaacaatgccgcgacgccgcccgccgcctggcgaccttatccaccgacgccaaacgccgcctccttgaaacaatggcgaccgccttgaacaccgatgccgcaaccatcctcgccgccaatgctgccgacctcgacgccgcccgcacccaacaggttggcaccgccatgctcgacagactcgccctagacccccaacgcctcgccgccatggccgatgccttacgtgacattgccgcattgccagaccccgtcggccaagtgacccgcgacgaccagcgccccaacggcatccatgttcagaaaatccgcgtcccactgggcgtcattgccatgatctatgaagcaagacccaatgtgaccgccgatgccgctgcactctgcatcaaagccggcaacggcatcatcttgcgtggcggttccgaagccatccgctccaacatcgccattgccaccgcactacagcgcgccttgcgcctcgcctcactgcctgaaaccgccctgattctcgtccaagacatggcgcgccacaccatgctggaactcctacaactcagcgaccttattgacctggtgatcccccgtggcggcgaaggcctcatccgcttcgttgccgaacatgcacgtatccccgtcattaaacattacaaaggcgtctgccatcagtttgtcgatgcctcagccgacatcgagatggcaatacgcctgctgattgacggaaaaaccacccgtccggctgcctgcaacgccctagaaaccttactcgtccataccgacatcgccccacgcttcctccctgccgccgccgctgccttacgtccctatggcgtccagctgcgtggtgaccacgccacctgcaccttgcttcctgatgtggtcctggccacggacgccgactacgccgccgaatatctcgacttaatcctggcaatacgtattgttcccaacgtagatgccgcacttgaacatatacgccgctacggctccgatcacaccgaagtcatcgtcaccgccgaccccgcacatgccgacaccttcgtacaacaactgtattccgccgtcgtcatggtcaacgcctcctcgcgtttttccgatggtggcgccctcggactgggcgcagagattggcatttccactacacgactccacgcctatggccccatgggattagacgcactcacagtagaacgctttgtcgtccgcggccaaggccaagtccgccactgaccctcttatccacctgcaccgcgacgttagcgtagcgaatatgcggcccatcacctcccagcgcctgcccccttgcatcgccaaaaaaaagtgatataaatcgcaaaaaataaggcaaaggaagccgccccaatgcaacccaaggacacccagaccaacaggccaccgcatccctgccagccctgtcaccctccccccagatcaccatcaatcacacccactccctgtcctttaaaaacgaaagagacagcatgtcttatgcactctgtctccatgtatttaaatacttaaaggaccgtctatgccgtttatcaatgaaattcccagtgccgaagagatcgagaaatatggcttgttgccttataaaaatgatgtgaatctccctatgcgcctgcgtagtcaatggacagtggatcgtgaacgcaacttccatttatacgggggggggaccactgcaaatcaggcttttacagatgttttttattaccgcttttatctgtatttgaatgggacgaagtttgttgttgaattagatgtggaccctaatcgtaaacctcccacatttaaggacaacccatatgtggttgtgtggagcaaactgatgtcgatcaaggtatggcctcatgatcaggtgagtcccttgaagagagtaccgcccgcagcctgggacacccccgatgcgccgcaaccactcttggacaatcgctcactcaatcaattcattgccattctgaaagaggcattgacggtgcatggagcaggtgaatctaacgatagcattcacaatcccattgtggtccgttttggattttaaatcagaggaagataaacatgtcattgactgtagaacaagccaacgcattactgggcagcatcaccactagggagcagttgcgcgatttaattaatcagctcgatattcatagcagcggcagtatcacggttttatatagcggttataccgcaaatgggttcagcaattcacagattctccaggggatgctgtataacggcgacgctatccgggtgattgataccaccgaggccgccaagtttttgaatatcccctcgaatgatccctacagaaataaggcgctgctgcgcagtcattattatgtggacgttctgttgcatggcgatgatggggattcaactgcaaaccgcagtgtcatatgtttgataaagcaccatgatcgggtgttttatcaaggatgtgacaccgccacaccatcgcaagggaggggagcatgcagtaagcagtattttattcattaaataacatcatctatgtatttcacaccgtaaaggaacatctatgccgtttatcaatgaaatccccagtgccgaagatatcgaaaaatatgggttgccttataaaaagcaactaaatttggatatgagactgcgtagtcaatggacggtggatcgtgaacgcaacttccatttatacggggggggggccactgcaaatcaggcttatgaagagattttttattaccgtttttatctgtatttaaatgggacgaagtttgttgttgaattggatgcagggagaggatctctagtttttgaggacaacccttatgtggttgtgtggagcaaactgatgtcgatcaaggtatggccccatgatcaggtgagtcccttgaagagagtaccgcccgcggcctgggacaccccagatgcgccgcaaccactcttggacaatcgctcactcaatcaatttattgccattctgaaagaggcattaactgtgcatggcgcgggagattctaatcgtcgcattcaccatcccattgtggtccattttggattttaaatcagaggaagataaacatgtcattgactgtagaacaagccaacgcattactgggcagcatcaccactagggagcagttgcgcgatttaattaatcagctcgatattcatagcagtggcagtatcaccattttatacagcggtgatacggccaatggggtcagcaattcgcagattcttcaggggatgctctataacggcgacgctatccgggtgattgataccaccgaggccgccaagtttttgaatatagaacccggtgatcccaatagaaataaggtgctattgcgcggtaaccattatgatggggattcaactacaaaccgcagtgtcatatgtttgataaagcaccatgatcgggtgttttatcaaggatgtgacaccgccacaccatcgcaagggaggagcgcacgcagtaagcagtattttatttactcaataacatcatctatgtatttcacgctttaaaggagcatctatgccgtttatcaatgaaattcccagtgccgaagatatcgaaaaatatgggttgccttttaaaaaagatctggatttagacatcagtctgcgtaggcaatggacagtggatcgtgaacgtaacttttatttatacgaaggtggccccactgaaaatcaggcttttacagatgttttttattacggtttttatctgtatttgaatgggacgaagtttgttgttgaattagatgtggaccgtaatcgtaaacctcccacatttaaggacaacccctatgtggttgagtggagcaaactgatgtcgatcaaggtatggccccatgatcaggtgagtcccttgaagagagtaccgcccacagcctgggacacccccgatgcgccgcaaccactcttggacaatcgctcactcaatcaatttattgccattctgaaagaagcattaactgtacatggagagggaaactctaaccgtcacattcatcatcccattgtggtccgttttaaattttaaatgaaaggaataaggaaatagagatgacactcactgcagaacaagccaacgcattactgggcagtattaccacccaggagcagttgcgcgatttaattaatcagctcgatattcatagcagcggcagtatcacggttttatacagcggtgataccgcgaatggggtcagcaattcgcagattcttcaggggatgctgcataacggggacgatatccgggtgattgataccaccgaggccgccaaatttctgaatgtcgatcctaaagatcccaattcaaatacagcgctttatcaaaaactacaacagattattggtgataggcctgataggtggggcagcccctccaaccaattcctgtttggcgaaagaacgttcgatggcacgcgtcttccgaatggggcttgggacacgatctccgcccgctttgtgaatgacacggtgggtgaggtgcgcaccctgaccggcggtgcctcggtgaatggggtgtttaatcaaaccgaactgccgcgcttgttgaacaaccccaatatcacctcggtggatgggttgcctatcgctgatttgcggcgcttgggggtggcggggtccttccaggcgatttcagcacaatcagagcatctctctggctatttaaaggtggccatcaatgcggatggctccatcatggaattacccggtggggtgccacgtttagacagccagcaatactttgcgctgaccggcttggaaggcaagccgccgctggtggatgcgggagattacggcgccctggcccgatacatccccgcgcgcttggacactcacctggagggcgcgcgcctggtgcaggacatcaaagacaggtatcagcgtaccacgcagttgttggggccggagtctgctgcggcacgtgctgatgcgttgcgggtgctgggcaaactcggtgtggctgccgatctgctgtcgctggcggtgatggcgcacgatgccaatgcggcgtacgccagtggcaatatcgagggcagccggcagattgtgcaggattggaccagtgcgtatctgggtggcttgatgggtggtttggcggaggccaaagcggttgggctgctgttgactccggtatatctggatggcccgattggggcggctgttgcttcggtgttgacggtggcggccggtgtggaaggcacgttcttaggcagccattacatcggcgcttttctggataaggtgttcgaccagctgcaccatatcggggagctgtcaggggcgaggttgtatgactgggtcactcagataggcgatctattcagacgcctgaatcagacattgcacacagacaacgcctccctgctagatctgctgcatgacctgtttcgtaatagccgtgatgaacgcgacccgctggtgctggacctggacggcgacggcatcgaaaccgtggccgcgggcaaaaatatcctctttgaccacgacggcgacggcatcacccacgccagcggttgggtgaagtccgatgacggcttactggtgctggaccgcaacggcaacgggcgcattgataacggcagcgaactgttcggcgccgataccgtcctggcgaacggtcacaaagccacctccggctttgaagcgctgcgtgatctggatagtaacggtgatggcctgttcaatgccgccgacgcccgctttacggacgtgcgcgtgtggcgcgatctcaatcaagatggccactcccaggccaacgaactgttcaccctctctaacctgggcattgcctccatcaccctcacgcctacggacacccagcgcgtgaacctgggcaacggtaacgtgatggatgcccgcggcagctacacccgtaccgatgggcgcagcggcaccgttggcaatctgcaattaggtgtggaccagttctaccgcgattaccgcggcgcccacgacacagtgaccattagcgaggcggcccgcgctttaccggccatcagcggcagcggcgcagtgcgcgatctgcaagaagctgccagcctgtcgcctgccttattggcggcggtgcaggcgctgctctctggcaccacccagggcacactgcgcgcggcgttagatcaggtgatcgcgctgtgggccagcacctcaaccatgcgcagcagcgaggaatccctggaagcctccggagagggccaccgcacggtgtattaccacggcttggtggtccccggaagcgtagcctcccagggcgaagcggccgttttgccctggataaaagagcagcacgcccggcttgggccgatcattggcattttggaaaagttcaacggctcccgcatggtcagcgagcaaaacggccagatcagcatggtcgggcggaccttcgcctggcaacgtgttgtccgtcctgatggacacagtgaagaagcgatgtaccttgcactgccgccacggcaattaagtgccaccttcgacgcctttgccgaggcctacgccaagcttaaagaatccatctatatccgcctggtgctggagccacggctcactgattacctgtccggactccgcctgaccgacaacaacggcgtgatggcatgggatgcctccggtctggaggccaagttagatcagacctggcagcacaacaaagctcaggcgctacaggatgtgatggacctataccgctatggcagtaacgccgtggcggcgagcggctggaaacccttcgatgccttacgccacatgatcgaccggaccgcagcgacacccgatgggaggcaagcgctggcggctgcggagatcaccctagtttctggaaatgccgaaggcagtgacgccgcagatctgctgtttggcgatgcgggtgccaatcttctgcggggcggcggcggtgatgatgtgctctccggtggtggtggcaacgacaccctggaaggcggcgcgggcaacgataccctctacggtgacgatggcgatgacgtcctagacggcggcgaaggcagcaaccgcctggaaggcggtgccggtaacgatgtcctgaaagtgtcgtattggtccgcagataacgtactgatcggcggtaccggcgatgacacgttgtatggcagcgcctttgcggatacgtatctatttaatcaaggagacggccacgacaccatcattgagcaaggcgggactgacaagctggtgtttggtgaggggattcttgccgctgatgtccggttactacgcgaagggcaagatgtggtgctggacctgggcaacggccacgacagcatccgtttgaaggactggttgacttccaatggcacccgcaaccatagcgccgacattgaacagatcgtgtttgccgacggcacgctctggactccggagaccttgagcagcatgggcctcaccacgctgggcacccccggcaatgacacgctcaagggctggcaaggcaaggatattctgctgggcggtgctggcgatgacgtcctagacggcggcgaaggcagcaaccgtctggagggcggcgctggtgacgatgtcctgaaagtgtcgtattggtccgcagataacgtgctgagcggtggtaccggcgatgacacgttgtatggcagcgcctttgcggatacgtatctatttaatcaaggagacggccacgacaccatcattgagcaaggcgggactgacaagctggtgtttggtgaggggattcttgccgctgatgtccggttactacgcgaagggcaagatgtggtgctggacctgggcaacggccacgacagcatccgtttgaaggactggttgacttccaatggcacccgcaaccatagcgccgatattgaacagatcgtctttgccgatggaacgctctggactccggagaccttgagcagcatgggcctcaccacgctgggcacctccggcaatgacacgctcaagggctggcaaggcaaggatattctgctgggcggtgctggcgatgacgtcctagacggcggcgaaggcagcaaccgtctggagggcggcgctggtgacgatgtcctgaaagtgtcgtattggtccgcagataacgtactgatcggcggtaccggcgatgacacgttgtatggcagcgcctttgcggacacatacctatttaacaaaggagacggccacgacacgatcattgagcagggcggtactgacaagctggtgtttggtgaggggattcttgccgctgatgtccggttactacgcgaagggcaagatgtggtgctggacctgggcaacggccacgacagcatccgtttgaaggactggttgacttccaatggcacccgcaaccatagcgccgacattgaacagatcgtgtttgccgacggcacgctctggactccggagaccttgagcagcatgggcctcaccacgctgggcacccccggcaatgacacgctcaagggctggcaaggcaaggatattctgctgggcggcgatggcgatgacgtcctagacggcggcgaaggcagcaaccgcctggaaggtggcgctggtgacgatgtcctgaaagtgtcgtattggtccgcagataacgtgctgagcggtggtaccggcgatgacacgttgtatggcagcgcctttgcggacacatacctatttaacaaaggagacggccacgacacgatcattgagcaaggcggtactgacaaactcgtgtttggtgcggggctgtctcggaaagaggcgcgttttacgcggtccggggatgatctatctctgctgttcaatgggagtgaggatcaggtgactgtggcgggttggttcaacgggtcagggcatcaggtggaatcgttggtgttccaggatgggacggtgctgtcggctgaggtggagcgtttgattgcggcgatggcgctgtcccctgcggtaacgacgatgcaagccagtgtgggtgagaccaaggagtcgcccaggttggtcgccagttcgattgtgtgagtatgtgatctgttgttgtgttgccaggccccgcaactgcggggcctggtgtgtttggtctctgggaggtgtgttgtcgcaagggcaggaatgcaggtgtgcgtgggggtgagagggatgtttgatcgggggatggatgctgtgttgtggtgtatcggatgggtggtggtgctgtcgcgcagggggaggggggttattgtggcagtggcggttggccgcgtttggtacggaagtagtttgtcaggcgccgtgaggcttcttcggcaaggaggccgccgtagacgtggacatggtggttgtggcgtgggtcgttgaggatgtcgaatgtgctgccgcatgcgcctgttttggggtctgcggcggcgtagatgaggtgtgcgatgcgtgcatggatgatggccatggcgcacatcaggcagggttccagggtgacgtagagggtgcagccaggcatgcgatggttgcgcagttggtggccggcggcgcgcagtgccatgatttcggcgtgtgcgctggggtcgtggctggtgatgttgtagttccatccttcgccgaggagggtcccttcggggctgatgagtacggcgccgacggggatttcatcgaattctgttgctgcacggtgggccagggtcagggcatggcgcatccagtggatgtgttctggcaaggcggggggtgggggtgtggcagtcatgttggtttcaggtggtgtcgctgtggcggtgtaggaaggctctaaaggcggccaatgttgtttcgctgacgtggtgttcgatgccttcggcgtcgcggcgtgcggtggctgcatcaatgcccagggccagtaggaagcgttctacggtttgatggcattctcggcttgcggcagcgagtgctttgcccgcaggggtgaggaatgtgccacggtatggccgttgtatgatccagccatcgcgggcaagacgtttgagcattttggcgacggtcggttgtgcaacgcctaagtgtgcggcgatatcaacttggcgtgcttggccgctgtcagcgagaaggtcggagatcagttctacgtagtctttgatcagttcgtcacggcgtgcttggcgcacttgacgaaagcttgcgacgtgaatctttgcatcaatcaggggggcggtttgtgtttgggtgttctcgtgtttgggtatggtgtgcctcgtgttcatcggggattgcatcgttggtcatcgctattttggggtaacttttttgtgcttgcgtccatcacatggtgagtcggcattgggcgttccgtgggatgttttgaatggtgaaatgttggtatcaggtgtttggctgtgtttggtatgggcagcgatttttttgtagggtgagttgcggtatagccaatgctataagatgggatgtgtcgctgcttattcatcgttctatgtcttcttctatgtcttcggttcagcctacgtctccagtgtcggattctcccagtcttggggagatgcatgccagtgttgcggtgtcgcgcagggggcattgggggttccgtttgttggcctttctcgggccgggctatatggtgtcggtcggctatatggatccgggcaattgggcgacggggttggcgggtggttcgcgtttcggctatatgctgttgtcggtgatcttgctctccaatgtgatggcgattgtgttgcaggcgttggcggcgcgtttagggatcgccagtgatatggatttggcgcaagcgtgccgtgcgcgttattcacgtgggacgactctggcgttgtgggtggtctgtgagttggcgattattgcgtgtgatttggcggaggtgatcggtacagcgattgcgctcaatttgttgttaggggttcccatcatttggggggttgtgatcacggcggttgatgtggtcttggtgttgttgttgatgcatcgtggtttccgtgcgcttgaggcgtttgtgatcgcgttgttgttggtgatttttgggtgtttcgtggttcaaattgtgttggctgcgccgccgttgcaggaggtgttgggtggttttgtgccgcgttggcaggtggttgctgatccgcaagcgctgtatttggcgatcggtattgtcggtgcgacggtgatgccgcataacttgtatttgcattcttcgattgtgcagacgcgtgcttatccgcgtacgccggtggggcgacgttcggcgttgcgttgggctgtggccgacagtactttggcgttgatgttggcgttgtttattaatgcgtcgattctgattcttgctgcggcggtgtttcatgcgcagcatcattttgatgtggaggaaatcgagcaggcgtatcagttgctcgcgccggtccttggggttggggtggctgcgacgttgtttgcaacggcattgttggcgtcagggatcaattcgacggttacggcgacgttggcagggcagatcgtgatggaggggtttttgcggttgcggttgcggccgtggttgcggcgtgtgttgacccgcggtttggcgattgtgccggtgattgttgtggtagcgctgtatggggagcaagggactgggcgcttgctgctgttgagtcaagtgattttgtcgatgcagttgccgtttgcggtgattccgttattgcgttgtgttgcggatcgtaaggtgatgggtgcgttggtggcgccacgttggttaatggtggttgcgtggttgattgctggggtgattgtcgtactcaatgttaagttgttgggcgattatgctgttcatttgatggttggtgtcagtgattgaacagtggttaggtgattgatccggcaagggcgttgcagtcaatggtcatggtgttttgtgttgatgcatcggtttgctgtgtttcaaggggctgtttatggaatgcccgtttgcatggttgttgatggtggcagcaggcgccacaatgatgtgttggctatttgttgggtatcgttttgatatgtgaagcatcgtgccatgacgctatttgttttggttggggtgccggtgcggatagttcagtgatgttctgtgatgtggtgaggttacgttgaggctgtggttggaacagttcgttggttgtgctgtcttttttacgtgttcgattcaattattttttctatgtatatgcggcgaggtattggcggtggggatgtttggcgggtacatcggaatgggtgtgtctggggtgcggtgtggtgttgccgaatcgaaacagtgtggtcacgagaagcagatcatgcagtcgttgttggatgcgatgttgggtgtatgggttatagggtgtgcgttgttggataggtggtgctgaaggggcgccagcggtagccgtcatatatttcaagtttttggaagcggcgtttgtaatccattttgaagtggtctttgatccaataacctaggtataggtatggacgctgttcgcgttgggcccagtggatctgatgcaggatggccagtgtgccgaggccgcgggccgctgcgtttggttcgtagaaggtgtatacggctgataaggcttggtgggttaggtcagtgactgcaactgccagtagttggccgggtgtgccgttggtggcgggttcgcggatttccatgaagcgcccgtatccccaggggccgatcaggaattgatcaaattcaatggccccgtgaccatccatgccgccatcgggatgacgttggtgcaggtagcggcggtagagtgaaagttgttctgcgttacgttcggccggcacgatgcgtgtgacaagcgtggcgttgcgggccaggcagcgacgctggctgcgatttggaacgaaagcattgacattgacgcgtactgggacgcaggcattgcagtgttcgcagtgtggtctgtacagcaggttgccggagcggcggaagccccaagccagggcttgtgggtagatggcacccaggcgggggtcgtttgggtccatgaccaaatcgcttgcccatctgtccggccagtaaccgcatgggtgaaggttggtcttgaatagctgtaggtcgtcgtgtggtttggagtctatcgccatgattgcagcatagtggctactgggggtgcatggttcgtgattttcttatggggtgaatgttgctgtcaggggcaacggcatgtgtgcctgtctgtctgtgcattcaatgatagatgtccaagcggtagtgttgtttttgaggtgatgcggatggggggcgatgtgctgtggtaaggagtgattgttgcgtgccattacgaaagggttgtttgcattgctgggtgtgaatgccggttttgtcgtggtcttggggcaacgggtgggatgtgaaggggtgttggatgtttggatgatgctttaagtggctttcgtgttgtgtatcggcatcacatagaggttgttttgtgtttctttaggtgggtgtgggggtgtcttggagggtgggagatcgttatggagatgagtagttgatggtttgattttaacgcatcggttggatttgcacgcggactggttgttcgtcttgtggtttggcccgttgttgtgtttggagcgaggtttgcggtgttgtcattggaggcagggagtgatgccaggtgatgatcagtccgattacagcaatcgtcagcagcagggtgaggcggatacgccatgtccaatgaagtgaccgtggtgcaatggtgttgatgggggaggtaaatgcgttgtcggtatcggagaggttatgccgggtggtgtccagtaaccccgcttttcttagaatatcgcgtgcgaggggttggtcatttgcatggacgatccagacggttggatgttggtcttggttatttgtgtcgaggtagctgaactgaccgttgcgcttgctgtggtaagagcgttgatggctgatttttacttggatgtcggcttcgttgaggagtgcggcgacaccttcgactgtttccatgcgctgactggtaaagatggcacgcatcggttaatccttggagggcgttgtatggttggtgatgcgcatgagtccttcctgggcggtgttggcgatcaatacgccattgcgggtgaaaaattgtccgcgggccaatccgcgggcgccctgtgcggtggggctttcaagcgtgtataacaaccagtcatcaatgcggaatgggcggtggaaccacagtgcatggtccagtgaggccatctgtacttgtggtgtgtggtagttgattccatgtcgtgaggtggctgtttcgaggagctggaagtcggatgcgtaggttagcaatatttgatgcaattcaatgcggtcaccaagtggggcgttcatgcgtagccacaagtgttggaatgctgaatgtttctgcaaatccagtgtgttgttgggaggcacgcggcgaaattcaaattgtccgctcaggttgagccaggtttgcatttggagtggcattctgggtagtgcttccggaggcagcggtggggttggtgcgatgtcttctgggggaggaactgctggcatgttggtttggtgttcagcgccgtcttcgcattcctggaatgatgccgtgcagaaaaagatcacttgaccgtgctggattgcggtgacgcggcgtaacgagaagcttttgccgtcccgagtgcgttctacgttatagatgatcggttgttggatgttgccagtgcgtagaaagtaggcatggagggagtgcgcaatgcggctgttttcaatggtgttttgcgctgcggccagggcttgggcaagtatttgcccaccaaacacatatttcgttccaatatcacggttttgaccacggaacagattatcttcaagcctttccagcgagagcattttggtccattcggaggatgcgttagatgtggtatgcgttggcaagataatgtggcctgaatagtgtgatgggtaattcattatagcggaggggatttatttggaaaaatcataatgatgtagtgctgaatctctgaatctgttgtgcatttttccgatcttttggaatttctgtgggtttattttggaatggcggggagattgtttctctgctgatcaagattgattcgatacgtgcatcaaggaggattgcatggtgtatttgaatgttgttgcatttaaatacatcactgataacgaatatccatattcgctagggttaatgtgtgttgattgtttgatacagattatggtggtttatttccaatagtggattccttcaagaactagttgcccgtcattacagatgaaagcttcacgcttgcatgtttccggactatttcttgatgagaggcttttgaaaatcgagtgtcttggtgttcaccagtaaaaatgggacgggcttgttgggtgtgtcatagggtgaggcaggtatttaatcagccaagcattattcttggaaaaaaattattcatgggggtgtgtagaagaattgaatattttcgtgatttttccgctaatttttcggtaggcggggcgagctgtataacgactagagatgggtgattctcggcgatgcgatcttcagcgatacagtcgtttaattaaaattgcattcattgtttggcaatcagggcatggcacttggtttgccaagcaaatgcgcggtacatctaactccatcttaaacggcaagttttgttgaagtcaggcagtaggcaaagacacatggttgtgtacggtcagtgctaagcaaaggaaaagccgctggcaaaccagcggcttttccgaacacatgaagtactgaagaaggattacttcttctgttctacagggtttttcggcttgttggcaggagctgctccagattgcttggcagcgtctgctggaggagttgtggttgcagcggcatcagctgcggtgttggcagcagcagcagtatcggcggcagctggggttgcgtcagcaggtggattggcagccgcctgatcggcggcagcttgagcctcattggctgcaggattactagcaggattagaatcctgggtcggtgccgtttctggtgtttttgtgccgcacgcagcaagggtcgcacccatcgccagtgcgatcagtagtttgttgatactcattcgttcaatcctcgtcgttagttaggcaacgcgcaagatgcgcgcgcccaacatgatgacgaccaagattcgggtgtcaagcatatgcgcattcagtttctggaatttgcagttaatctaaattaaatcaattcgatagcgaagggcaccgctttgctttcattaggagcgttgtgggctgaggctgcgcttttaaccgtacctgcgcaaagcgtgagattagagacactggtgcattcagtcaggatgggatgattgtgaggtcaacaatcaggcatcatcgtaaagaaatttgttggtaagcaggagtcgctgtagtgtctcctgtaagtatcgtaacctattgattatatatgggtttgtgcgtcacggttgttgtgtgtgacatccattgtgcttctatgtgatgcgctggtgacacttctttgggatttagcttctaaatgacctgcatcttccatggggtatgtgttgctcaaagagcaatgaatcaaggtaataggtgtccgcttaacctggctagacaatatgtatcccgatgtcctgtgattttgacccctatgcctatgaaggtgacggcaaataaatacagaaggatgggggggctagtggagctgaatggttttgtatcagtggattctgagcgaatgcagtacgacactgaatgcgcgtctttcgtatagaagcgtgtgatctctggtgccataggtcagctattttagattcccccattcagggatgcgcgttgtatcagtaggtgctttacaaggcagggtaacccagtctgtgatcccttcggagggaccactggtatgaggatgctattggtgatttggtaacgatagccccaatggtgatgattcacagcggttgtgcgtgttgagccgaacgtaggaagaaatggcagtgatgtacttggcgatggttaagcctgctttgagatcgcaggggtgtgaatttgacttgcttttaaatcagatgcttgagcgataatttcgtacttttttcacataaaatatgtgaaatttgtgattttttgccttgtgcattgaaggataaatgaaaacgatgaaaacgatatttgctgccaggacgatcttggcatccgcattgactgctgctttgagtgcctgcggcgatccattagttcgctcagagacaccgacaccgacaccgacaccgacaccgacaccgacaccgacaccgacaccgacaccgacaccgacaccgacaccgacaccgacaccgacaccgacaccaacgccgacaccaacgccgacaccaacgccgacaccaacgccgacaccaacgccgacgccgacgccgacaccgacaccgacaccgacaccattgcccactttggatccgtcgttagctgccaagtttcgggtgcacctagatggtacgaatacagagcctgctcgtacacttggctttactggcaagggttacatgattggcgtcgttgattccggcgtgaatcgtaaccatgtgacgttgcacaatcaggtcatccacaacaatgtgtatgtggattatcaagaccccgccagttcagatgatgtgagtggccatggcaccaacgtggcacagctcattgcggggcaacccgttgaatattggcctggtggtatcgcaccaggggcgactatcttctcagcgcgcgtcttctcgtctgcagcagaaagtgcaaaagaaggttcaataagcggaaacttttttgaaagagaaacagcacagctaaaacgcgtcaatgccgacatgattgccgcaggagtgcgtatccaaaacaactcctggggatatgagagtgaggacacaggtggtgagccagtatggagaagtccaatcaccacgggtttgttcgtgaatgcataccgtgacttcgtgctgaataacaatggcttggtggtcttcgccagtggtaatgaagcccaaccacaaccgggtcaacttgccagattgccgagcttgcccacggtggaggggggggcatcgcctgccgatctggaaaggggctggttagtggtcgctgcactggatagtttcgatcatcccgaccaattgacttcgtactcgaaccactgtggcatcgcaatgcactattgcttagctgcaccaggtgatgtcgtggtaatacataacagcgtgaccaacagctcttctgttgacgatgagtattatgaactacagggcacctcgtttgcagcgccgttggtttctggtgcagcggcattggtatgggaggcatttccctatttcagcaacgacctggtgcggcagaccctgcttggtacggcgactgatcttggcgtccccggcgtggatgaagtcttcggctatggtgcactgaatgtgggtaaagcagtgctgggcccggctaagttcgattggggtgatgtccaagtcagcttcgatgacaggcgttccacctggggcaatgacatcaccggcagcggcggcttgatcaagcgtggtaccggaacactggtgcttggtggcagcaataatcaatacaccggagccacccaagtcctgggaggtacattgcaggcgtccagcttgggtgtatccgcagtcagtgttgctaacgctgcgacgttgattggtagcggtcgcttcggcggtgcgctgagcaatgccggcaccctggagcttgggaaggatgggctcaaggtgcaaggtgattacacccaattggagacagggcgtcttgcactgcacgttggagatcagctgagcgtggctggcaatgccaccctgaaagggggggaactccaagtgttgggtaaacgtgattatgtgaccttcaatacctcctacagcgtattgcaggctgatggtagtttgaccggcacgttctcgcagttgacctggggtccggctgtgctgcttggagaaggtcgtctgacctacggcgctaacaatgcctacgtgaccctgcagcgtctgaatgtcagcgcggcggcacaggccttggggatcgttgatagagttgcgcaggcctctgcccagcgtgttgagcaggcattccgtgcaattgatgcacagcaggcgcaaggcctcggtgcgttgcccaccagttttattggggcggcggcggcattgcaacagtccagtagcgcggcagtggcggcgggttcgttgcagagtttgtcggggcaatcgcatgttgcggcggctttagtgagcctggatgccattgatgtgggtcgccgtagtttggcgacgcgtctggatgcgcctcgttcgggcgagcgtattgtgacgtggcatcaggccttgggtggtccggggcagcatggtgcggctagcggcaccttctctctgtctggttggttggtgggacatgatgcgcaacttgcctccggtgacattgtgggtgttgcttttggtcagaccgataccagcccctctggtagtgcctttggatcgcgtgggatagacagacaagtgcaagggcgtgtgtatttgcagcgcacccaggggcccttatatgtcttggggcagcttggttttggtagtttccaacgtcgcctggaccggcagttgcaactgggtgactggaatgattggacatccagtcgctacagcggtcagttttggagtggcagtgtggaggctggctatcactggcaccagggaaccttggcattgaccccgtatcttggtctggatcaaacgcagctgcggacggatggattccgtgagcagagtggctctggctttggcttacaggtgcagtccgcccaagcgacgcggagtcagttactggccggtgtgcgtacggaatggcgctgggctggtgtgcaatggcgtggttatggtgaatggcagcagacgttgcgtcagagtggtttgaatccacaggccagctttacagcgacttcgtcgtggacgccgttggtggcttcgtcctggcctggtcgttctgggggtgtgcttggattatcgatggtcttgcctgtcggggtgaccgcaggtctgtggaccatggggttagagcattactttggtacacgtagcggtggggagagtcttggactgcgttaccagcttggtttttagtatgaggtgatgagggatgccgacgtacggtagtttcgtgcgtcggcattgtcacggaggggtgtgttactggtgatctgatgcgttgatggcagcacgtttgcagcgcttatccataggtatggccagtttttactgtttattacgtcgtcaatcacgtcgtcccttgtgcgtgctgttcctagtcatgtatctgggtgcgattttatttgttggtcatccttacagaggattccatctggcgctcaatgtgccactgtgcgatgtttttttgctgttctgatgtgtgtgtgtattgcgatgattggctgtatttgcttgtgctcgtatggcgaagcgtctttgggtgatgcgcgactacattgcaataaatgatgtgttcttccaagtgccgtcaagactttttgagtggtgacggtagcaacatcggttggtgcatagtcgaatgaaccagtggtgtgtacttcatggtcagggatgtttgacagcattccttgttaagtattttggctgcgtttgcctaccatgattgcgtaggtgaaagtgatggcaggactatcaattaatcgtaagctggcggctcgaccgtatgaggcgctacaatctgcgggatgagcagtggtggagttgggtggtgtaagcgtccggctttacaagagtccttaaggtccagtgcctttgaaactgtttaaggacttccaagctgttctaacgtgtttatggtggccctgccggtccctcgcaacgctagatcgaaaaccccgccagggccggaaggcagcaacggtattgattgatgcgggtgccgagatcaaccggtggggccatctccttttgtacgcgttccttcttgcaagttctttattttttggtaggtgtgctgtgttgccagaatgctccgatatgtttgtttggggaacttctcaatctgtgatgacagtgagcggtaaggcgtagcatctatattgatgggcagtgcagcgttcaaacttattgagctgccgagctgcaatgatccaggtgaggtgtgtcttataaggaatcaggcggaacatgcggaatgcttaatgtttctcggagtcgctctggtgttggcacggccaattgtgctgtgtaaaggcgtttcatgttgttgtacggagaatgatgtcggtcgaatcccgccagcatcaaaatgttgatgggtggggaatttgtatcggaatcgctggagcaaagtcacgctgcacaatagatgtgtgttctacaaccagtcagagagtgatggggtaggtaacgttgttttgtgagagctgctgatgttccaatgagtccgctgtgtgagcatgtctggattcaccacaggaagttcgatgaagctgggttgtcgtggtgtgtgccagatgcgttgggttgctttgatgtaatcatcaggtttggcgaagaagatattcggtacgtagcgctgcgggttgcggtcgtacagtggaaacaggctggattgcacctgcaccatgatgcggtgtccagtgaggaacgtatggttgacatttgggaggtcgaaacggtacagcagcggctgattcggcgtcattggggttggatattggaagctggtgcggtagcggccacggaagatgccgagtgatattgccagttcgttcccccccatctttggatcggatgctatttcatctggatagacatcaatcagtttgactacccaatcgctatctgtgccacttgtggaggcatgcaggttgatccggggtacgcctgcgatttgtaggggtgtggtcagtggttcactgaggtaagtcaacacgtctggacggttgtcaacgaagcgttgatcctgaaccagccaggtggtccacatcgcattgtctttgaagtttattggacgtggcataaaggggactgggttagcaggatcggagatgtattcgtcgtaatcattttgctttctttgcgatgtctggaatgacagtgtgccgccagcattgaggtatagcggcttggatgtgtactcgcagccacgctcacagctacgtggccagtgttgcatgcggtcccaatggttctctccagtgttgtagataaggacaggcggtgtgtcggctttggaggcaccatcaatcaagtactgatcgaagaatggtttcagtacatcgtggcggaattgcagtgcggtgttgccgtcgaatttgagggtgcctaggttgctgccgtcatagttgacttggctgtgacgccatggacccatcaccaagtaatttttgtcgttgtgtacgtcgcgtggctccatcgcggcataactatggattgcgccccacatgtcttcttgatcccataggccctgcaaccacattgtggggactttcagtggggtgcgtgccatgactttatccagtgcttgttcttgccagaagctgtcatacgctggatgttcggtgagtttgtgccaccagggtaattgttctaaacctgcggctttagcatagttgccggccgagcctgcttgcagaaagttgctgtaatcgtcgtaaccttggcgtgcgatggataggcctttgccgcgattggtcatctggccagagaaatagtcgaaattgacttggcggaaggcgccgtagttgaaccagtcatcgcccatccaaccatcaatcatcgggctttccggtgcagccacttttaacgctgggtgtggatcggtcagggccatcacgacggtgaacccttcatacgaggaaccgatcatgccgacgttgccattagactccttgatgtttttcaccaaccaatcaatggtgtcccaggcatcggttgcatgatcgatattggtgaggttgagcacaccccgtaatggtcgggtcacaacgtagtctccttccgagccgtacttgccgcgtacgtcttggaacacgcggatgtagtcgccggttgcgaatacgtcatctccctgtggcaggaggtttttcatgtgcggcgatagcaggcgttcgctacgctcgttggcgttgtatggtgttcgtgtgagcaacatcggcgcatgctgcgctttcttgggaataataatgacggtatgtagcttggttccgtcacgcatcggaatcattgcttcacgtttgatgtaatcgttccgttcggttggcacgatgaatttcctgccggtgatgtcaggtgtcatgggtgcagtttgggcgattgcggcaagaggcagtatgaagaatagagcggcgatgaagcggcgcataaatagttctgagccggtgggggggtatatgaaatgtaatacgtagttgaaacagagtcgatggatgttatcgcagtgttacctcatggatcgcccctgtttgctgagaagtggctcgagttgcattggtagtgtcatcggattttgtgaaataaccctcgaattcgacggtttctcatatgtaggacatagagagcagctcggatcgtcggaagagggggaggggggggggcgggaatgttgatggtttgatagaagaccgcagcggttcttgtgatgtatccacgcatggttgtcaggttctggctttatagcgtgtgcttgcaatcttcttatttgatgtttgtgtcaggcgtgtgcggtgtatttgatgctggcaagcgagagtgtttcgagatcaattattttgatgcgatgcatcaagtggagccaagtgtacataggtgaggaagtgagtgtgtcgatgcgttgtgtacgcctacgcgctttattttgcgtcctgcaggtgtttacaacgttatgctttgactatttgttgtcatgaaaacacgacttagtgcgttaggtgcgcgtcgtgccaccaaagaggtagatcattgttatcggtagtctgtgttgtgtcgttgctgtatatccttattttggtgcaggtttcgttgcttccggactgatgcgctcgatcgtgtgccgtagttcgcggccaaggatcacttgagcgtctttggcggatgtgtctagacgttcgtcaaatagcagtttgctatatgtgtctggccatactaagttcagttcgcgaagtttttggatgaagccgcggaacagtcctttatcaaaaaactccggtgcggtcgacgcatagagtaggcttaagcgttgtgcagcgagctggcacaggctctccaattcggatgcgctgagggtgccagggccgtttttcaccaatattgaaatggtgatgtagtagcgctcgaatgcttgttgcaatgaatgactgatcgcccgtaggcggaagacttcgtcggtctggcttgtgttgcgtgtgagtgggtcttcttcctcatcgccggctgacaggagaagcccttcccggacaaataattcaatgacctgttggatgtgttgggcaaattggtcctcagtccatggtaggaataattcggcttgtaggaatggatacataccaacccccagacggatcagagcaatgcggcttatgcgtcggttgtttttgaagcaacaggccacccacgcggaggcagtaaatagatgcaacacgttgttgcggaagtaactgagcaggactgcattgtctccatcgactctcaatacatcgccaagtggatggtggacacgggtgagtatgttgatttgttcggcgtgggcaatgatgcgttctggggtgtgtggagtgacggtcactcggtttgaatagggcaattcaagcagtatttttttgcacagagtaatttgcgcgatcaggtcagcttcacccatcgcatgtttaggtgtggatagcagtgcaagtgccaataagttgattgggttgacgtcagcggcgctgttgatgcgagtctgaatttgccgagcgagatggttgacggtgtttgataaccaagctggtttctcattttcgttgagtgcttgaccttcccattctggggctagttcggcgagtacgtcgttgagtgcgattggctcgccgaagttcaccacaacttggccatacttctgtttgagcactttgggaatattccaaaatagcctccaaatcgattctttctttttgggttctccggacagttcatctaagtagctggtgccttctatcagcttctcgtagccgatatagattggttggaacagcaccggcctgcgtggttggcgcaagaacgcttgcagcgtcatcatgatcattccgcccttgggttgtagtaggcggccagtacgcgagcgtcccccttcgataaaatattccagcgaataaccacctgccaccagttgtgctacgtattcgctgagcacgatcgaatacagcatattgcctttgatggatcgacggatgaaaaatgcgccgcatttgcgcagcagagtgccaacgatcggcagattgaggttgatgcccgctacgatgtgtgggagcacgatgccgcattggtataaacagtacgacagtagcaggtagtcaatatggctgcggtgactgggtacatacacaacctcgtgccctggtgcggtttctttgaagctatccacgtggtggatcagtacgccggcatagatgcggttccagacatggctgaacaaaaaatcggccgaacgtatgacagggctggaatagtcggcagcgatttcccaggcgtaagcttgcgccttgcgccaggtttccgacagatcggtaccgtcgcgcttggcttgggaggcaatggcttcacgcactgcttctgttgccagaacattgtctaccagtaagcgacgggttgacagatctggaccgatcactgtttcccgaatacggcggaagtgggcgcgtaatacacgttgtagcttgcgcagagtacgttcaggcggcaaaccttcgttcagtgtttgacgtactgagatggggggtgcgaagcacacaatggtgttgcgtccattgagtaataccgccaggaggcgtcggaagcggccaacgagcgcccaattttccgagaaaagcactgcaaaccagccactttgccgatctggtgtacgtccaatgaagatggatacgggcactaaatgcacatcaagggtgtcacgtatacggtgtgcttggagtagattggctagcgagtcggagtgtgttttgccgccgcgctggttagggatcagtgagttgctggagctacgtcgcgacagggccaagtaagcacgcttgcgctgtagtggattgcctggaagcggtatcaatggcgatggcaacttggttttgcggcaggctttgtccaggatcagtgtattgcacaggccatagtcttccagcacgtagatgatggggcggccatcgttatattgaacgcagtgttctggatattgaacgcagtgttctggctctatggagagatccaaccaaggatcaagtatctggccaagcaggcgcgcccacagcgggcgacgtatcgtgtgttcagagacgggccaggtcagattggatgatcccgaggtgtcaacgctggattgagtaggcgtcgtttctttcgggaggagtggggagttcttttttggcatcctcggtattatcgcttagcgggtatcggcaagtctttcatggtgacagatgcgcacaccgccattcatttgtgtgtattttcatccatgtttccaatgcacaggcaaggcaggtgtacacgtgatcgctactgtcccttttggggctagcggatcaaacagttcgtacgtatgcagcggcctcctaagcctgtgttgatcatggtggttctggtagatagatcgtctagcactttatctttaccacatcggatatcctgaaccgatcctggtgtgactgttcaccacaatcgcttacccgaagcgcttgtctcaagaaactgggtgtgacacaaggcacattggggcgcccccccttctcgattcgctgtttcgcgtcgattgcttgtataccttttaggacctttgatcctcggatcaatctagatgcgttggacgtgcttactactattttgctgcgatgctgagaaatgcaacgcatttacaccgtctggaagcgactctctccttcatcaagcagcacaatgcaccatccattggataaagtttgggggcggagccagtcgattgctgtttgacctgtagcctattgctattttgagttatcaatatgcttttaagctgcttttatactactggccagaataatcgccatcctgacgtgctcgcgtaaaaaaacagtattgcaataccaagaaatgtcaatacatcttattgatgtgcttttgcggtaagaaaatttagcggtgatacgcggtattgtgcatgtgattttctgatgttgtcccgtattactttcaataacagaaaccaattctggcatggtcgctctggcgattatctcgtgtctgttattgcgatatcaccatgtattcagtggattcttgaagatcttagtttttccagattctcttgattgattctggttttcatcagcgcaatgagaggacgtgtcatgaacatccgttaatgcatgtaatgaaatatcggagtttggttatggcttgatggacttttcatggttggtatttaccgctctaacagcgtttcacgctatcgctgtatcttccagtgcatcttttgatgtgtactatatcgagcttgatgggtcaccatgtgatgcgggtgctaagctattgagcgttccggacttggtttggtgggtacgtcagctcatgcttgtttattagcgccattgctggtgacgctatttgactattacccgagtaggagttgctgtccggtgttaaatatcaatagtgaccatgatgcgccagcgatgacccgttatttcttcaacaagggtgattacggcatcatttttatcggtgaactattggataacattatgtcaacccatatgctgtcgcgttgatggattgatttaatgctttcttatgcaagaacgattggctgcggtaatccgagttccataagatttatggtggccaagttgggccgtgaatcggtggaatacggtggtattctaatgccgtgttcgatgggaaaagtgcggtgttactgggtgacttaactatgttcggtcgtagtgtttctcagggagaagacggcatcgcccgaacaggcctggatgatgtgtggatcgtaaatgatgtcaaaacggtgcgaacgacgatgcgtgtgagtgtgtttggacctcaagggacgtttgatgcatgtttccatggaacatctgtcagatacgtttgttccgatccgctccttgcttgttttcatgccaattatcttgaaactgctcatccgtgcttcaaatttcatgtgcgcatatggtgttaattgagctttggcatccttaaatgaactgtacatctgaacgctagccgatccatttcttgcacgtaatactcgttacccttgggagagagtcaagatgaagaaatcctgctccagccagttgctgcagatatggcgtttgctgtgttacgcattagctgtttgtctgtacttggcactgccgaatgcattcgcgcagagcagtaatgccacgctgcgtggtcaggtgagccgggcgcagacgggggctgtggttttagtcaccaacaccgccactggtttggtgcgccggagtacgctcttatccgatgggacttacgcgatgaccggtcttcctcctggggaatacacgatcagcgttggtggcgtttcccgcacagtcacgttgagtgtggcttctagcgtgtcagtcaatttggatgctggtgtccccatcagtggcgatgcgaagactttggatgcggtccaagtgactggacaggcgatccgcgaagtcaaaacgtccgagatcggcaatacaatcgccttacgtcagatccagcaactaccgcaggcgacgcgtaacttcctggagtttgctgataccgtgccaggcatggcgttcaacattgaccctcagggacgcaccatactccgtgccggtgcgtctaatagcagcgccagtaatttgtatatcgacggtgttgggcagaagagctacgttgccaaaggggggatttcggggcagaacgacagccaggggagtccgttcccgcaactagcgattggcgaatacaaaatcatcacttccaactacaaagccgaatatggtcagatcggtggtgcggcagtgacggcggcgacaaaatcagggaccaatgaattccacggtgagacgttctatcgttacaccaatcaaaatctgcgtgaccggcggccagatgagggtgagaccaaggttgattcacagaccaaagaatatggttttgcgctcggcgggccgatcattcgcgaccgtatgcattttttctttgcctatgaaggcaaggacaatgtggtaccacgtggtgtccaggccgatgcacgtgctgcaccttatgtccattttctgccgtcttatctgtcgcaacagtacggtcctgtcaatttgccatttaacgaggatctatttttcggcaagatcgattttgagccaagcggcgatgaccgtttggaattgaatgtgcagtatcgcgatgaaactcaaatcgataatatcggtggccagaatgccgccgatcatggtctcaataagatcaataaagacaaacgtggcagcttgcgttggcagcacagtgctgatgcttggttcaatgagctgatctttacccgggaaaatgctagcaacaatccgaatccgatgagtatcggtaatgggtttaactacgtgtatctggacgaaaccgatcccaatatcggcgaatacacgttcctttccataggccctgatggtggctcaagtatgcagcgtcgccatcaagatggctggtccttgcagaacgatctaacgttcacccgcgttaagtggcatggtgaccacactattaaaatgggtgtcagctataagaacattacgctgcaatcacaagatgcggcatcgttgaacccacagttcagttatgcggtgagttccagtggagtggccacaacgccataccgcgttgatttttattcaccctatgcgactcctgggcagaagccgctggtggaaaccagggccaagcagtatggcctttatcttcaggatgattggaacgtcaacgagaaactgacgttgaatttggggatgcgttgggattatgaggacaatccggcttataccaattttgtcacttcgcaggcgtttgttgccgcactgtatgcggatgatccggagaatccaggtcacccgtgggcgaatcgattactgtctagtggtatcaacgttgctgattacatcagtaatggtcacaaccgtcataacttcaataaagggtgggcaccacgctttggtttctcttatgacatttatggggacgaggcggcggtgatgcatggtggtgctgggcgttcgtatgatcgcaatctattcgaacaaatggcttatgagaccagtaaagcggcgttgtcgccggttgccgtgtatttccaagatccagccacccatacgtgttatcgctctgatcgagtttgcgtaccttgggatccgaaatatctcaatggcattgatcagttaaatgccattgctggggtcagtggcagtggtgaactgtttatcttcaacaataagctgaagacaccttacagcgatcaatacagtattggtatcagtaacaagataggcggttggctgaccgacgtgacgtttcagcgtgtattgagcaatgacggttttgcaatgtcgcttgtcaaccgctatccggatggtaggtattttgatgctgaaggcaacgcgccatgggatcagtcggtccctggtcacaaaaacacgattctcggcatgaatggtttgaagcagcgtagtagccaagtgctgttgtctgttgagaagccttatagcaaggaatccggttggggagtcaatgtggcctatacgcacaccagtgcgcgtcaaaatcgcaccattgatgaaccatttgctttcgacaaggcaacgatctatgagtatccgttcgtcaagtccgatgcggttgccgcgcaccgtttggttgtttccggttcgatggatgggctgtgggggatgacctttggcgccaaggtggtgctggccacacctaccccgatcaatacgattgcttgttacggtcagattgatccagatggcgcgaattgccagcaggtgggagttattccaccgtccagcggaaagttcctggtgggaggtaacatttgggggtatcgcacggtggatttccaggcgagtaaagagttcacagtgtttaacgatttcaagctatcggcccgtgtgaatctgctcaatgcgtttaatttcaagaattacgcatcctatgtctataacagctttgggagtgatgggcgattgcaaccggacatcaccatcaatcggatcggcgatatcaactatgttccacgtaccgtcacattcgaacttgggatgaagttctgaagtgccgcatgcccgtcgtctgcttgtgttagccgacgggcatgttatctatagcatttctattgtcggtgtattctgaatacttctggtgttttcggggtgtgttcaataccgatagtgctcaggtttgaatggtccttctactgatatgcctaaataggcggcttggttagccgtgagtgtggtgagtttcacgccgattttctctagatgaaggcgtgcgacttcttcatccaatttttttggcaagcggtaaacatttttttcgtaaacgtctttgttttgccacagatcaatctgtgccagagtttgattggcgaagctgttagacatgacgaagctgggatgacccgttgcgcagcccaggttgacgaggcgtccttctgcaagaagaaagagtgtattgccgttgggtaatatgaatttatccacctgcggtttgatattgattttttgtaccccagccagggcattgagtgcatcgacttgaatttcattgtcaaagtggccgatgttgcagacgatcacttggtctttcattgcggtcatgtgttcgatccggatgacatctttgttacctgtggtggtgacatagatgtcggcctgaccgagtgtgtcctcaaccgttgtgacttcaaaaccctccatcgcggcttgtaacgcacagattggatcgatttcggtcacgatcacgcgggcaccgtaggcgcgcaaactatgtgccgaacccttgccaacatcgccatagccgcataccacagctaacttaccggccaacatcacgtccattgcacgctttaaaccatcagccagcgattcgcggcaaccatataggttgtcgaatttacttttagtgaccgaatcattgacgttgattgcaggtacgagcagcctgccggttgcagcgatttggtacaggcggtgtacacctgtggtggtttcttcagacacgcccttccagtcgttgacgactcgggtccagtagccggggcgctcaatggcgatgcgtttgagcaggcgtttaatcacctgttcttcaagtgagtcactgggttcatcgacccaggttgatccgttctctaattcatagcctttgtggatgaggagggtagcgtcgccgccatcatccacaatcaattctgggccggtcagtgtgccatccgacagggtgaaggtgagtgcttgcagggtgcaatcccagtattcctctaatgtctctcccttccaggcgaacacgggtgtgccgctggtggcgatcgcagcagcggcatgatcttgagtggaaaaaatgttgcacgaggcccagcgtacatcggcaccgatatcttttagtgtctcgatcagtacggctgtctggatggtcatatgaagcgagccggtcacgcgtacgcctttgagtggttgtttgctggcatatttgcggcgaatggacatgagtcccggcatttcgtgctcggcaatgtcgatttctttgcggccccagtcggtcaaggaaatgtctgcgattttgtagtgggtattgggtgatgtttggggatgggtgttcatggcgggatatcagttataggcagataggcggaaggtctgcacgtttcctggcgctgtagaacggtaaaaattccgctcgggcctggctatcggtaagacgtgaaggaggttgtagcgccctgcatcagggagtcgggattatatcgttcaatatcacggtgtgatggtgctgttacattattctttcttatatcaatcacaatttagtgttgcatcaagatcagttgtacgctgtcgttgagtattttggtttatatgtactctgaaattcattgagtgtggattggaacatgatgcgaatgacaacgtagataggatgttgtgttatctctttaatgggatatccatttttcttggatacccagttttggagtgtggctgcgaaatgagtttctttgaaatatatgcagtgattcagtggtttataatcggaattatttttttgaatttcgcagcctctcgttatttttcgagtcaggaagttatgaatgaatttttagaatgttctatgtgttcaccaatgaatgtattttttcagagtcattatttatagaaagttaggaaggattttttaattcaaaaggaatatcaatgtgttttttcgttgcgtgatgttttatttttccgttatcgattcagtggtatcacttttatattgacttggtgaatgtctttgctgctggacgtgtttcgttcagttctatttcagcgtgcattgaaacaattatccgctgctaaagacttggtatgatcgctttcttggattcgtttcatggtgaggcatatcgttattgttgcggtttattgatcgttttctttgattcaacagtgtgtgagggcacgtgtggttgaaacacagcagcgttaagagcgatcaagtgaaggtcatgcagagtgcatcgtatgttttgatgctttagtggatagattcttttgatttcatgtggtgcactgtgtttgtgtgctgtatgtatcgaaacggtgctcagaatgtattgtgcattgttaccgtagagtcgcgggccttgtccttgtgccgatgtgccagacctggtcggtatgcctgcatggggatgatctccttgactgctatctctacgctatgtcgcttgttgcttttccctcttcaggtgtcgcgtctcttccgatgggtgtcggttcgcttcatcggccattggtatgggtacatgggaagcctattaccctggggcgttttttagctcaggtccgtggtttggctgcccaacttcctagtgggcgttatgtggtgaatttgtgtgaggatcgttaccgctttttgttggcgttctatgcgtgtgcattacgtgggcaggtttctcttttgccgtcttcacgtgctccgggagtggttgctgagatttatgccgcttatccagatagttactgtttgggtgatcgagagttatctctggagtcgttgcgttattggcacttgcccgagatctttccggaattagatggtgcaataccgagtctgtccgaagatgctgtggttgcgattggttttacttctggaagtactggggtgcctacatccaatctcaaaacctggggtagtttggtgaccagtacggagcaggattgggttgcatttcatagtttgtgggggtctcaggttccaacggtcgtcgccacagtgccaccgcagcacatgtacggtatggagttctcggtgttgttgccgttgctggcgccagtggcggtgtatgctggtcggccattttttcctgaagatgttgcgcaagctttggctgaggtaccagcacctcgtttgttggtgacgacaccggtacatctgcgtgtgttggttcaatcgggtctgcgttttccggaggttgccggtattgtttcggcgactgcgccactgacacatgatttggcggttgccgctgaggcttgctttggctgtgaattacgggaggtatttggttctactgaaacctgtacttttgcggtgcgccgtacagtgtatgaacaagcatggacacggtttgatggggtgagtattgaggtcaatgctgatgtgacttgggtgtatgcccgtcatcttcccgcgccgatggctatcgctgattttgtggatgtgtacgaggatggtcgttttgaggtgcttgggcgtcaggccgatttgttggagatcgccggtaagcgtgcttcgttgggtgagttgaatcggtgtctattggccattcctggtgtggtggatggtgcgttggtgcagatgccgcttgaggctgatcagacggtggggcgcattgctgcggtggtggtcgcgccaacgttgcatgaggtgcatattcaaaaggtgttgcgtacaaaaattgatccgctttttctgccgcgtcgtctacgcaaggtcgatgcgttgccacgtaatgagactggtaagttgccacgcgaggcgttgttggcgttgttggcggatgtgtgttgatgaaagagggggattgatgtgtgtcagcttttttgaaaggcgaatggataggtgtgtacgtacaggcatgatgtttagtgaagcgtcgctgggagggtgatctccaggatgcacgttgctgttttttttcaatcgttgacgttcgatgttgtcaatgatggtgagtggggactggattgttgtgcatcaggtcaaaggggcaggattgtgatgggcgaaggcactgtatctgtttgaatagtatgtgtttgcttaatgcgtaacactgtgttggtgaatacatctgtttgtaatgtcagttgggtgttattcgtcacgcagcattgtttattgggtttagttgctgagatgcgttgtttgctgatagctattttggcgtggcgttggattttggtgtttagtatgggatgcaaatatcggggcattgtctaaagggtgacggcagtgcttggcattcacgggctgtgcggtgggttgtgtgggtacttttttcaatgggtgtgttgcaggcgtgcaattggggcgtggtttgatggtgtgtgtgatcgagtggagtgttctgggaaggagtgggttttatcactcagtcagtagtggtgtttggtcgtgaagtccggatgtcatctcggtttgtaagttggacaattttttgtcacatccacgcgtttgataggtggttccagattcggtgctggttgtggtagctgtggaggtttgttgtctgatggtgatgtaatgggtttgaaatgtggaattggtgttggtgttttttggtgttcttattaatcaatgttgctctcaatcatcgcgttctaagagcatgttaaaggctgctttagtaggtgaattctcattgtgttgatgtgttgattgtcttgcgtggatggcttcaagggtcagcatcttgcgtactggagcgaagcttcggcggtgctctagacatgggccatgctctgctaaagcggccaggtgtgcgggtgttccgtaccctttgtgtttgtcgaagccgtaatgtggatattgcagatgcagttcaaccatatggcggtcgcgggtgactttggccagtatggaagcggccatgattgtgcgatcacgtgcgtcaccgccgaccagagcttcagccgggcaggggaggtttttagggagacggttgccatcaattctcgcggatttggcaacgtgagcgacgccttctacggctaagcgcataccgagcatggtggcttggtaaatattcagtgtatcgatctgtgtgctgtcgatcatgaccactttataggccaaggcgcgctcaacgatgtgagcgtagagacgttcacggcatgcaggggacaattgtttggaatcgttgaggccgttgatgcgtggttgtgagggatcgaatacgactgctgcaacgacgactggtccggcgagggggccacgtccggcttcgtcgacgccagcgacaagtgctgtgttgctactgggaagatgttgtgtatcaaactgggacaccatggttacctgctgtgtgtggtgctgattcgtggtgcagtgtccccgagtgttgcagtctatctctgcggtaatagttcggtgattgcttccgctgcgcgtgtcgatgcgttgcggcgtagttgtgtgtgtaattgcagataacggttttgtagtgcggtcactttctggggatgtttgaaccagtccagcagtgccgcgcagagggccggtgcggtgcaatccttctgtatcagttccggtgcaaggtcttctcctgcgaggatgttgggcagggcaaaacgattgatttttagtagtttcagtgttttgacaatgcgataggtgagtggtgcgactttgtaagcgacgaccattgggcgtttgagcaacatggcttcgagggtcgctgtaccagaggccacaaggaccacgtctgcggccaacatcgcagtacgagcgctattatcgagtaggtgtgagtgcatgacgggtaaggtggagcgcgagagttgttcggctagcagtggtttgcattgtgtgtttgcagctgggatgacaacatgcagtccgggtaggtgttcagataattgtccggcggcttctaagaaggtgctgccaagttggctaatttcgctatggcggctgcctggaaggactgcaagcactgggctgaggaggggcaggcccaatgcagttcgcgctgtggcacggtcggtttgatagggaatctcgtcggccattggatggccgacgaagcgtgcatcaatgccgtagcgtgcgtaaataggtggttccattgggaagagacagaggacgcggtcgacgctggcaccaattttcgcggcacgtttctcacgccaagcccatatcgagggactgacgtaatgaacggtacggatgtgacgctgtttgaaccagcgttctactgtgaggttgaagtctggtgcgtcaataccgatcaatacgtccggatgccaagccagtgcacgtttgcagaattcgcgacgtatctttaaaagacgtggcagatgccgtagtacttcggtcaggcccataaccgcgagttcgctcgtgtcaaaccaagtttggcagcgcgccgagcgcatcatgtccccgccaatgccgacgaattctgcggtaggcaagcgcaagcgcagttgttggattaatccagcgccaaggtggtcacctgatgcttcacccgcgatgagtgcgatgcggggtgcttggatcatgtcaaggtgccgtggtgagtcagtttggtgtgcggtaacggggtatcggtgggtatcttctgctttgaggttgagctcatcgtagtagcggcctttgcgctgtctcgatgaattggaggagttctttgatgtcgtcgttgtctttggcttgttcagcgacttgctgttttgcttcagccagtggtagtccggctacgtataaggtgcgataggcacgtttgatggcggtgatgcgttctggagtgaagttgcgccgtttcaatccttcactattgatgccccttggacgaccaagggtatcgctaccgattaaggtgaacggtggtacgtcgccattaatcaatgttcccatgccgatgaaggcgtatcttccgattcggcaaaattgatgtgcgccagagaagccactgaagatcacccagtcaccgacggtgacgtgaccagccagcgaggcgttgttggagaatacacagtggtgacccacgtggcagtcgtgagcgatgtgggtatacgccagtatccagttgtcattgccaattgaggtgacaccaccaccaccgccagtgccacggttgatagtgacgaattcgcggatggtgttgttatcgccgatcagtagttcggtgcgctcgcctgcgaactttttgtcttgtggttcgccgccaatcgcggcttgaccaatgaatcggttattacgcccgatcctggtcggaccatgaatagtgcagtgcgatccgatgatcgtacctgtgtctatttgcacgtcgttaccgatcaatgtaaaggcaccaatctgtacgtctggggctaacgtggcggatggagcgatcactgcggttgggtggatcaaggacgcatgcttattcatcactgcttccatactgggcgcttaagacttgacaccagcacacatgatatcagcgcaagcgacgacttcgccgttaacccgcgcttcgccgtagtagcagcccatattgcggatccggcgtttcatcgtcatatccaggatcaggatgtcgccgggcaccacctgtttgttgaagcgggcattgtcgactctaaccatataaaacaagaggctggaatgcccattatggctaaggtttagttgagtcatcacgccgccggcttgcgcaagtgcttcaatgataagaacgcctggcatgactggatgttcaggaaaatgtccttgaaagaatggttcgttgatggacacattcttctgagcaacgatacgcttttgcttctggtctagttccagtattcggtcgaccaatagaaagggatagcggtgtggcagcaatgcttggattttaatgatatcgattggtaattccagacgagtgtgagcggtagtgggtgaatcgctcatgctttctccttactgacggccatcatgcggcgcaccagcatatccagctgtttaaaccgtacagcgtttttgcgccaagtacgattgtcggtcaatggagtacctgatgagtactcgccgggggtgtgaattgagttacgtacgaccgatttgccggtgatcacgacgttgtcacagatctggaggtgaccaacgacgccaacgtggccgccaagcaaacagtagcggccaattttcgcgctaccagcaatgcctgtacagccggcgattgcggtatgtgctccgatccggcagttgtgtgcgatttgcactaaattgtcgatatgcacatcctcttccaatacagtgtcgtcaagtgcaccgcggtcgatgcagctgttggcgcctatctcgcaatcatcgccgatcacaacgccacctaactgcggtattttgatccagtgtccgttttccattgcaagtccgaagccttcgccacccagcactgcaccagggtggatgcgtacccgtttacctaagcgtactttggagatcaacgtgacacgtgcaatgagttcactgccgtcatcaatggtgcaatcatcgccgatgatactaccggttcctatgatgcagcttgcgccgatgctgctgcgtgcgccaatgctgacaaatgcgccgacatgcgcggttggtgagacatgcgcgcttggatcgacggttgctagaggatggatgcctgcttcacgtgctggttttatgtcgaatagtgcggcgatcttggcgaaagtgacgtaagggtctttggcgatcagtactgtaccggaggctgttttgacatcgtcggcatggagcacaatgacgcccgcacgactattgaggagctgtgtgaggtagcgtggattagcgaggaagctaagctgttccggacttgcttgtgtgagtgtggcgacaccgtggatacggaggttgccgtccccaaacagttgcaggttaaagcgttcggcgagctcttgagcagtaaagattggcatgtttacgctgaaaattttaatgtctggtgcctgtccgaagaaaaccactcatgcggcagtgaatcagacggaacgctgccccccgtgcgcattgtagtgcttggggggagaaaaccctgtgtttttaaagcggctggatgcttggccggaggtattaggagtacaagaaggtccggtccccgctatttctgtagttagaattggccgccgaaggtgaattgcagtcgctcgatttcgtcgttgttttccttctttataggaaatgcatagctgatcgagatcggaccaatgggggcacgccatagcagcgctacgccgctggaagcacgtaattcgtttgccttgaaattatttacgccattgaagacgttgccgaaatcaaggaaagctgagatacgtgccgatgggctgtcgaaaagctttgggaagtacatttcagtcgatccaacagtcttgaaggaaccacccaatggttggccttgattgtacagtgcggtcacttccgagcgcggtcctagggtgttatctctgaagcctcgtaccgagttggtgccgccggcgtagaaattttcgaagaaaggcaatccggaagcagtggccacagtcccgtcaggcaggatccgagtgtgactctttccgtagtcgtctccgtagcctacttcaaggcgcgtgttgagtactaacgctgggataattggccagtatttcgagatctggtaattgattttgtagtacttgatcgttgagccgggtagtgtcacttctgcgccaatgcgctgatacataccaagatttggcatgaagtagtcgttgcgagtgtcacgtgcccagcccagctcggtgcgccaagcgcggaaggtacgctgtccgactgcgtcgatgtagtcgataattgcttttggcgtggaacctgggaaggtcgtgatttggttgctatctgcgccgatgacccaagagacagtgtcgttctctgtaatcgggattccaaagatggtttgtcctgacatacgcttgctgttgtattgcgcagcgttgaagtctgagtagtctaatttttggtaggccaagttatagcctagtgagacgccattgtcggtgaaaaacgggttggtgtaggagaacgaatagcgatcttggtatctgctgcgtgaagcatctacggacacgcggttgccactaccaaggaaattgttctgcgataactgtactgaagtggtgacaccataggttttcgagtaacccaggccgacctggaagctacccgaggtagtctctttgacggtatagacgatatccacttggtcgttgcttcctggaactggtgtgctctctacgtccacggcttcgaagtagcccaggcgttgtaggcgtatcttggagcggtcaatcgctgcttgcgagtaccaactgttttcgaactgacgcatttcacgacgtagtacttcatcggaggtgcgggtattacctttgaacaggatctgacgcacggtgacgcgaggcccagggataacgtgcaagttgacggcgacggtacggtcagcgcggttggctgttgggattgggttgaccttggaaaatgcgtagccgatattgctcagcgtattaatgatcgctgccgagctgtattccagcagaacgcgcgagaaaatgtcacctgtcttggggatgactagcttttcgattttttcctgaggtaatacggtgttgcctgttaccttgatggaggagatcttgtattgatcgccttctgtgacgccggcagtaatgaacatgttgtgcttttcggggctgatcgacacttgagttgagtcaatattgaaatcgacgtagccacgatccaagtaccaggagttcagcttctcaaggtctccagacagcttttctttagagtattggtcgtcacggcggtaccaggaagcccagttgtgttccttggattcccaggcactcatgacatctttgttattgaatttttcagtgccgatcagattgatgtgccggattttggcagccttgccttctttaatcgcgatcgttacatccacacggttacgatccaatggagtggtcgttgttgtcatctgaacgttgtatttaccgcggttgttgtactggcgtttcagctcttgggtaacgcggtccaggctgagccggtcgaaggtacctccttcgctcagtccgatctcagataggcccttgaggagttcttcggacttgatgtccttatttcctgtgatggtcagcttattaattgccgggcgttctttgactttgacgaccaatatattaccttggcggtctatccgaacgttttcaaaaaaaccagtgcggtacagcgcacggattgcatcagcaaccttagcgtcatccacagtgtctccccggttaacaggtaggtaagtaaagaccgtgcccgatgcgatgcgctgtaggccgtcgacgcgtatatcgtttgcaacgaaggattcggcggcctgtgtcaagacaggcaagctgaaattggcagcaatggttagggtaagtaaatggcgggtgtaaaatcgcgtcatgttaaatccgattggtgtcgataacttgggttacagggtgccgacgcatgacgacgacagtttcggttaaacacagcctcacctcacatagcggttcttcagccgagcagatcgttgtagaacgctagccccatcagtccggcgagtagcgctaaaccgatgtattggcctgcggccatggcacgtgtgctaagtgggctgcctttgagtagttcgatagcgtaatacagtaggtgccccccatccaatattggtattggaaacaggttgataatcgctaagctgagtgatagcaacgacagaaaatagatgaaccatcctactcctcgtttggctgatgcattggcgatcttggcgatgctgattgggccagagatatttttcgccgatgcttggccagtgatgatccgtttcatcattcccaatgaatcggcggtcatccgaccggtctcgcggattgccagcggtacagctgcaagtacaccataacgttgttgactgtcgaaagctggcaccggtccgggattagtctttacaccgagtaaccagactccctgtgctgacttccgagggctgagttctagcgccaagcgttcttcaccacgcctgatctctatcattcccggatgtccatcgcggcccagtttctgaatttggttgtataggtcttcggtggaaagggtctgttgtccatctacggcaaggacgatatcccccggttttatggcgccttcggcgattgaaccaggttcgattttcgcaatgatgggtggctgcaacatgaattgccagtttatgccaaccagtgcggtcacgtgcctttcatcaaaaggttgttttagctttgataattctaaggtgtgctcgctgcgctcgccgtaaggtccgataacgcgtaaaacggcattctgcctatccatggctgcggccgtcagtagcatgctggcttcgctccagctggtgacctgacgaccatcaatggctgtgatgcgatctccaggatggataccggcttgtgcagcaaggtgttcggcacggcccacagttgctgaataatcttgctttccgatcacgaacagtacccatagcagcagcatgcatagcaataggttggcgagcggtccggcggcgacgatggcgatacgctgccataccgatttacggttgaatgcttggttgcgttccgcgactgttacatcagcctcgcgttcatccagcatcttcacgtatccacccagtgggattgcgccgatcacaaattcggtacccgagctactgcggcgtgaccaaagcggtgtgccgaagccgattgagaagcgtagaactttgacgccgcagcggcgtgcgacccagtaatgcccgaattcgtggaacgtaaccaggacactgaagctgacgatcatccaccagatagatgcgaagaaatcacccataagattttgtattgatgtttgcgatattagagtgggagtgggagtgggaaatgggtgagtgctgcgtgtgtgatgcggcgggtttctgtgtccacggtcagtaaagtctccaaagtgtcggcctcgtaacgaggaagtgtagtcagtgcgtgttctatcagtgctggaattgttaggaaaccgatgcgcccctgaagaaacgctgaaacagcgatttcattggcagcattgagcactgcaggggccgtgccgccagtctgcatggcgtcccgtgccagacgcagacaggaaaatgtttcggtatccggacgctcaaagtccaacctgttgtgcttcatcaagtccaaacccggcaccccggaaccgattcgctctggccaggagaggccaactgccagggtggtacgcatgtctggcaggcttaactgagcgagcgtcgaaccatcaataaactccaccagagagtgcaccaaactttgtggatgcactagtacatcaatctgttcgctaggtagtccgaacaaatggtgggcctcaatgacttccaagcccttgttcatcagtgtagccgaatctaccgatatctttggtcccatcgaccacgttgggtgggccattgcttgagtgggagtgatcttggctagcatcgtgcggttgtggccacggaatggaccgccagaagcagtcaaagtgatccgatgcacgccatctgtagtacgcgaacgcaggcactgaaaaattgcgttgtgttcgctatcgatcggtatgatctccgcgccactgatgctggcctcacgcatcagcagcattccggccaggaccagcgattctttgttcgccagcaacagacgttttccggcgcgtgctgccgccagtgtcgaatggaggcccgctgctccgacgattgctgccactacggtatcgcatgtggtgctggcgaccagttctgctaatgctgcttctccagcgtacgctttggtggctaaaccagcggcattcaggccgtcgcgaagagtggtgtagagcgttgcatcgccgatcaccgcatggtccgggcgatacgtgtggcacaacgccagcagtgcatcgacgcgctggccagcggctagcaggcttacatggaactgtctggggtggcgtgcgagcacatccagtgctgcggccccaattgagccagtggcaccgagtacggcgacgttgcggatcggtttagtcatgctcagaaaccgaagatgtcttttcccagtgcgaacacgggaagtgcggcgagcgtgctatcgatacgatcgagaacgccgccgtggcctggaatcatactcccggaatctttgatgccggcgtggcgcttaagcaggctttcgaacaaatcgccgatcaccgaagccaagattgctacgaatgaaacgagcaatagtgatgggaactgggtcatggtgacgccattcaatagaccaaaaccagtcgctactgccaatccagtgagtatgccgccgaggaggccttctacagttttgttggggctgatctgaggtgccagtttgtgtttaccaaagaggcgaccagcaaaatacgctccggagtcagcggcccataccattatctgagccgttagcagccacaggtgggcatgtaagctctctggaaatgttgagccaggcttatcacctgagtggagtaggaccagtgcagaccacgctggaatcaccgctaacgtgcctgcggtgagtttgactatctttgcggtgcgttggttagggtcggcacaaaatccgaggaagcgtagccataacaatgctaggatccaccaggcgataccaatgagcgtggcaatctgaaacagcaccagtgtgtgagctgaaacccaaaccaataacaccatgagcagcaggttcagtgtcagcagcacggtgcgtaccaaggtgtcctctacctgggacaacttcatccattcccataagccccataggaagatgattgctgtcaatgaggctaaccaggccgttggtaaaaacaggatcgaacacattgcgacgggtgccatgaccagcgcggcaatgacacgggttcgggtcatgcgggtatgcttcctttcccccggctggcgatttgtgcatttgttagaccgaagcgacgctcccggctggcgtagtcgtccaacgcttgctgcaatacggtcgagttgaattctggccacatcacgtcggtgaaccacagctcggtataggcgatctgccacagcaagaagttgctaattcgaataacaccgctggtgcggatgaacatgtcgggcggcggcagatcagcgagcgccatgtgttgtccaagcaaatcttcatcaatctgctctggtttcaatcgtccggcagccacatcctgggccagagcgcgtgcagccatcgtaatgtcctggcgtccaccgtagctgacggcgagtgacagtattaagcgttggttgttggctgtcaggtgttccgccttggtcatatgttcgacgagagcgatgtcaaagcgtttacgttcccctataaagcgtacttgtacaccgcgtcggtgcagttcttcgatgccgcggccaaataacttgatggacatttccatcaaaaagttgacttcatcggctggccggttccaattttcgctggagaatgcgaacaatgtcagcatcttgattcccttctccagacagaaatccacggtgcgcatggctgcttttaccccggcacgatgacccgtggtgcgcggccgtgatcggcgttctgcccagcgcccgttaccatccatgatgatggctatgtggcggggaagtgtgggattgactggtatggtgttgatctgcatcttcagaccgtcatcaattcctgttctttggacttgactacctcatccacgcttttgattgctttatcggtcagcttctggatgtcttcttcaccttggcgtacttcgtcctcagtgatttccttgctctttagcatatccttaatctgctgattggcgtcgcggcggatattgcggatcgcgactttggtgtcctctccctcgctgtgcacgactttcgtgagttccttacggcgttcctcagtgagtggtggcaggttgaggcggatcaatgtgccaacaacggttggtgtcaggccaaggtcggaagcataaattgctttctcgacgtccttggacatatttttgtcgaacaccgtgatgaccaatgagcgtccttctgagacgctgatgctggcgacttgattcaatggtgtatcggtaccgtaagccttgattttgatgccatccaatagtgatggcgaagcccggccagtacggacagatgccagggagttgcgtagagcgtcaatgctctttgtcatgcgatcctgagcgtcttgtttgatttggttgagcatcgcctgaatgttcattgataaagcgtagttgaccgattatagctgggactggtgcttgtggtgctgagggggtgatccaagctctttttctggtgaatccctaagcgttcttcagcgtagagcaaacgatggctttgcatattccattgcctaagccaattactctacttgaatttgactgccagacatgaaatgcctttagtgtctgccttccaagtttcttcacgctgctgcggcttttctctctcctcacatgatgccaggcccaggagtgtgaaactggcaatcctgcattggtaatgtaggaagaatgtaagcacttggatactcaatgcttgcttgacgattgggatctgggtgtaccaagtagaagtcggtatgcgatagccgccggaataacacactatcgttacgttgatatgtgttgatgtgagaagttattgttgttgaggagagggggaaataaagaccttacaggcgggcggggctgaagacgatatccccccgtcatttggtacggcgacacaacgggtgcttgcattctacttttcaacactcgtgctgcagtgattagctcttcggcctattgagtcgtattggttgtggttggtaccagtgatcccttggcgttcggtgaataggtgttgcgggtgtcgtttgctaccgagggtttcttaattgattgagttcggtctagtggattgaccttctgggggtaggttagtgatgggcggtgtatatacgcattacttagaacttgtggttgattgaaattgcaagtaagtcggtattgatgttgtaatcacccaccaaggtgctagctgttgcgttgatttgcgtgatagttggatgaccgataaacagatgtgcatacccgatgttgtaatcggtttgctttgatggtttccaagtcataccgagtgagatccaggtgcggttgttgtcgggcacccgtacgctgcggtattcggcggtggtcggtgtctggtcataacccaagccaccacgcagcgtcagcatgtcgctgaaccgatattcggtcccgagagcaacaaaagtggtatctcgataggaaaaattcagtgcgttgttgggctgagaggatgcgaaatgaatggtgattttgtcgaacttgctccaggcagtccgagtgacttcagccattatggaccatcggtcatcaatggcatgagtgaagctggttgttgcgctggcaggtaggcggatcgtggacttgatttttgtattgatgaatgtccccgttgcagccactgccagcactgcagcagcgttctcaggcacagcaaagtgagcgtttccattgttgacgttgtgttcaacctgagaccggtagctgaagccaagatgggtcttttcatcgggactgaacaagccccccagtgtgaagcccctgctggtatcgtgaccttcgatgtgtgagtaaccatcggcactacccggggagaagtttggtacgtgacgtgcatttagaatgctcccgaagtcgatcgcattactcaggtccacgttcaagcgttcagcaaacactgcaccgccgaacgacacgtacgggttaacgtcataggaaacggctatgcctagatcgattgcctgtaacttgctatagatgccgtgatagcgtcctgtccagttgcgatcgtattttgtactgaaaccgaatggtgcgttgagcgttgcccctaaatgcacgttgttgttatcgcccaaaggcatgtggaaataggagtcaggcagcagtgccaccatgccggcatcaccaccattgccgccaccgattgtgttgccattgcgataaattcctggattcccacgatattcggcggaaaatctgaccgtgctcagatcggcctggaattgtcgtccgtcgagttggcgcatgccggcagggttgttgacaatgatggcggcgtcgtcttgggcgcttgccgcgcctgcgaatgaccgacccagagctttagcgctgttctcctttaattggaaagcagcagcgtgcgcattaccgatgtagagcacaccagtgatgcttagcgttagtgcagtaacgttgactaaggtgaaaacatgtctaatcatgcggtgctgcctcgttgaaggatgtctactcgggtgttccttacctgcctattctgctatctagctagagccaggcagtagatgcctgagtctcatttcaatagacgaatcatgctgtactgcaactacatgcggatccttgctgaacaataatgtctccatcgctgtaaagtaggcgactgtacgtatgtggaatcaatgattctcccgagttggtattgggccaacctatgtttgtatctattccttcacgcaatcgaccaacctggctttgggcggtgccattgcttttttttgctgtattgatcgcgttcctgtggtcgatcagtaggccaggccaagaacgcagtatgctgtggctggattggggagcactgtcaggtggcttctctcatgtgcctgacatgtggattacctcgcagggtggcagtgcgctgcgcctgtttacagccctgtttctccatgccgattgggctcatttgttgggtaatctcgtgtttctgctgatctttggcttaccagccgaacgtatcctcgggtcgtggcggttactgctgctgtttctgcttggtggcgcactggccaatttggctgcggtgttgaccatcggtagcccgaatcacgtgattattggtgcttctggtgccgtttcggcgctcattggtagttacctggcattgtttccaggagctaagttgggagtggtgttgccgttagggttgtttctggagtttatccgggttccagctcctttcctcatcgggttttgggcgttgctgcaggtcgtatttgcttacactggcccgacattggttatggttgcttggtcggcccatttggcagggtttgtatctggtgttgtctacggaagctgtgtacgcgctacaattgtgcggcggctgcgtcagtgatgttggttctgaatgtgcccccattatatggtgacaatgtgggtaacagtacctgcaagatgtatcgctaatacaaaagaagtgacatgagatggacgtataatctatctcatgtcaaaaacactatacaaaattattttcgtcaaccagggcaaggtatatgagttgtacgcccggtgtgtgatcagtagccatttgtggggttttaacgagattagtgagttggtgtttgatgtgcatagtgggcttgtggtcgatcccacggaggagcagttgcgccatgaatttgcgaacactaaaacgctgcacctgccgatgcaaagtatcgtgcgtatcgaagaggtggataagaaaggccaatctgttattcgtgatgctgagacgggtgagaaggttgtgacacctttcatagcgccattcaaaccacgttgatgccaatggttatcttgtcgtttatctgattacggtgcgcaatattttttcttacattaactgatcaatgtagcttctcaagatatccatgcgcatttgctcatggtggttgagtagtgttcatttttttgaataaccagtgccatgatgaactaggggcatgcaacggtatggactggtactcaaaccctattacttgcttaaggatcagtgttgcaaaagatgccgcgtagcggcatcacgtgtatttactttttatatatcaatgaattttgagattttccgcccataatttttaaatacatggattttgtgcgtaatgtctggttttgaagcagccttgtgttccgtcagatgttgaattaagcgaaccgatattgcataaaatcgtttgtatcgttcaatgccgaatgcgtgttcttttcttggcagacatagtgttaggtgctgtgtgataatcggcggcggtgaagtcggctgggcagtcgcgtcatccgagaggatgccgaggaaagtccgggctccatagggcaaggtgccaggtaacacctgggcggcgtgagtcgacggaaagtgcaacagaaagataccgccaatattcctttctaggattcggtaagggtgaaatggtgcggtaagagcgcaccgcgagttcggtaacggaccggcacggcaaaccccacctggagcaagaccaaatagggatcctatggtgtggcccgcgctggatccgggtaggttgcttgagcaccgtggtgacgcggtgcctagatgaatggctgttcatgacagaacccggcttataggccgacttcaccgctttgccatgaataattgctgttaagtttcctacttttgttcgccgatgcagtcgatgcatgcacctatcaaatgttggtgaggtgctgtatttgattgaagcactgcaatgttgcgctgcatcgctgcctgcacatgtcatttggtctggaaaagaaacattgggatgcaaatgtccgctgaagagacccgcgcaaaagcactttgaaagtgtgtatgtgactctatctccagcatggtcagcgcaataccaatgtgaaaaagatccgcaacagcggttttatgttgtagcgggtcagagcgctgcttcccttctatttgaccttcagcctcaacagccggggatatgcagagatgattgagcgtttttacatgggcaggccatcatttttagctttttgagttgcgttccttaaccaaagtgccaatctcttcgccgtgcaagatgcgtagtagtacgccaggttgctcaatgtcgaaaatgcgtaatggtaggttgctgtcacgtgccagtgcgaaggcggcggtatccatgacttcaaggttctgcgaaatgacttcgtcgtaactcagcgtgctgtacttgactgcgtcgcagtgcttttgcggatctttgttgtaaatgccatcgactttggtcgccttcaatagcaaatctgcgccaatttcaatggcgcgtagcgccgcgcccgaatcggtggtgaaaaagggattgccagtgcccgctgcgaagatggtgatacggcttttttccaggtgacggattgcgcggcggcggatgaagtcttcgcatacgttgttgattttgattgcactcatcactcgtactttggtgccgagcttttccagtgcatcttgcattgccaaggcgttgatgattgttgccagcatccccatgtggtcaccggtgacgcggtccatacccttggcagccagacctgcacctcggaagatgttaccaccgccgatcaccaaggctaattcggcacctgcgttttgtgcctcaatgacttcacccgccagtcgattgatcacttttggatcaatgccgtaatccgcgctccccatcaacgcctctcctgaaagtttgaggagaacgcggtgataggcaagttttgacatgggatatctcaatgagtgaggggggagcaaacagtgtcattctagcggaggcggacaagctgtgctgttggcaaagcaaaagcaaagtcatgttggtggagaagtgtcatttagatgaaggcagagtatcggtatgtagcgaccatgcttgatttgttataggacgtttttaagcaatgcagctgccaatggaaaagacctcatttccggagactgtcagctaagtcattttaaaaaattgtaagccatattgttataacagttgattgtagtgtgatattgattgagttttcataagaccattcgatcacatttgacgcttgatgtgatcgaacataacggcgtgccgagagcgattgccgcgtgcgtagcgccgctggacgctatgcgatgcgcagccgatctgaatgtagaggtagcagggtggagggcgttgcttgagggttagtccaagtgcctatgtgtctgtggtcaccaaatttgaagccaatccgttccttgaggttttgcagtactgcgactcgttgggcacagtgtgtgcagatgactggaaattgctttgggtttggggagatgaaatggtgattggtcgctgtgccgttgccggtcaccgtaggcctttcgcctacagcgtagttgggggcgatgttgtagcaaaacaaaagggccaagcctataaaggctgaccctttagttttacttcacatctacctggtgccgaaggtgggactcgaacccacacacttttaagggtggcggattttgagtccgctgcgtctaccaattccgccacttcggcatggagaggggattatagcgaaggattcaggcccatgtggaaaaaatgatagatgggcacgtatacagccattagcacggttgagatgagttgccaaagaaggtgaccccctgcatagggggggaaatatggcgtccccacggggattcgaaccccggtcgccaccgtgaaagggtgatgtcctaggcctctagacgatggggacgtacgacgcaaagcatgttgataccgcttcctggtttttggttgagcgtgcgttggtggagccagccggggtcgaaccggcgacctcttgcatgccatgcaagcgctctaccaactgagctatggcccctggaaatcgaggttgcgatcatatctgggcagtaaatactgcgcaagcactttaattaaactggtcgttgtttgatgttgtatagatcgctgagtgggttagttgttgtgtgaacgaagcgaggaaatacacgggtgatttttgatcttctgatcgctaaaactgcaacggattttgcagattactttttcggtaaggggctactgggcatgggattacagatatgtccgtagatctgcagatgaatcgatatttagtggctgcgcgcttgttggatgattgctgcggcctttgaggaggcgtttttgatgttgtcccaatgcccttgagcgagccagtctttgggaaccatccatgagccgccgatgcagatgacgttgggttgtgccagatagtcgctagcattggtttcgttgataccaccagtggggcatagtttcagattggttagggggccggccaagctggtgagcatgtgcaggccgcccaccacattggccggaaacagtttgcagacgtggaagcccaacatcatgagtgcgagcaattctgttgctgtggccgcacccggtactgtggggattggtgcatcggctagcagctgtgccaaggtgggaggggtgcctggtgtaataagaaagtcggccccagcgtccattgattggcggagttgtcgttcgttgagtacggtccccgctccgatcgtgatttctggttgttcgcgcttgagagttgctaatgcttccagggccactggggtgcgtaaggtcagttcgatcgtggtgaggccgccttccagcagtgcgctgacgacacggcgcgcctgatccactgtgtccacggttacaacaggcaggatgccggcgttgtataacagggattcggctttgttttgggtttcagtaatgctcattcgtgtctttaatagggcaatgtcgataggacaggggattcagggcaagcggtgtgtgctatttgggtgatgtctcatgtgtctttgaactcgtctgtcagggggctagggtggcgtgatcttctggcgtgtcgttggcagtgttgctccacacgtggttgtccggaggtgccggaccacaggagatcgagagtccgccttggtcggcagggccaaccacttggcggttgatcgcaaacaggttgcgccccaggtcgttgcttgtggttgctgtgtttggggctggggtgcgcgtctcccattcggttgtcggtaccagggcttccaagatgccggcttcaccatcaaggcgtaggaggtcgccttcgcggatgcgtccaatcgggccgcctcgtgctgcttctggggtcaagtggatcgccgccgggaatttgcccgaggcgccggagagacgtccgtcggtgaccagggcgatccgccggccttggttttgcagcaatcctagcaatggtgccagcgaatgaagttctggcattccgttggcacgcggtccttgatagcgaacgaccaggatgaaatctttggggagtgcacctgcggcatgcagtttatgcaatgtctgtggtgtgtcgatcaccacggctggcgcttcgattgcccggtattccggtttaaccgctgacagtttgatgagcgcacggcctaggttgccacgtaggaggcgcaggcctccttggggttcgaatggatgggtcaccgggcggactacggatgcgtcggtgctggtggtcggtgaggggttgtagccgagtgtgccgtgatgtaggtgaggttcttgggtgtaggcgcgcatgccgcctgcgacgatggttggcaagtcgtcgtacatcagtccggcatccatcagttcacggaacacaaaggcagtgccaccggcggcatggaatcgattgacatcggcttctccgttgggatagacgcgtgccaggagtggtacggtttgggagatgcgatccatatcgtcccaggttagcaagatgccggctgcacgtgcgacggcgatccagtggatggtgtggttggttgagccgcctgtagccatgagggcgacgatggcattcacgatggcgcgttcgtcgattaatcgcccaatcgggcggaaatcctgccccagtgcggtgatgtgcaggacgcgttctgtggcggcttgggtcagtgcctcacgcagtggggtgcctggagagacaaacgaggcgccgggtaattgcacgcccattgcttccagcaatacttggttggaattggcggtgccatagaaggtgcaggttccgggggcgtggtaggaggctgcctcgactgcgagcagttcagcacgtgttgcctgaccagccgcgtagcgttcgcgtatttctgctttttgtttgtttgggatgccggagggcatgggtcctgcagggacgaaggcggcgggtaggtggccaaatgccaatgcgccgatcagcaggccggggacgattttgtcgcatacgcccaagtagatcgctgcgtcgaacatgtcgtggctgagtccgatagcagtgctttgagcaatgttgtcgcgtgagaatagcgacagttccatgcctgcccggccttgggtgacaccatcgcacatggccgggacactgccggcgacttgtgcggtggcacccagtacgcgtgcggtgttacggatgatgtctgggtaatgttcaaacggttggtgtgccgaaagcatgtcgttgtaggcggtaatgatgcctaggttcggggtgattgcttcccgtagacgttctttatcagccgtgccgcaggcggcgaagccgtgggcgaggttgccgcagcttaggcggctgcgggatggtccgtcgcgcagtgctgcatcaatcccggcgaggtagttggtgcgcgtggtggcgctgcgttggcggatatggtcggtgacggcttgaatgttgggatgtgggcgcatgggcggtgggttatgaatggagcagagggtgttttagttgactttgctctctcattgcaggccagtgatggggtgtgcaatctgttgcgagggtttgtattcttccacgatggatgtagcgctttttgcgagggcttggttaagcgcaccagtgcacgcggaggcgcgcatttggtaggtcgatcgcggtccttatcggatagtccagtgcatctttgcaggagagtgctgtctccagaacctgcattttttgtttgccgcacagcagcagcagacggtgtggaatgttgctgagtccagctggagtgagggtgatacgcagtggccagacgccggcgccggggcagccggtggcatcgagtgctacgtagggttggagagtacttattgcttttgggagatccaatgagcctggaaacagtgatgcggtgtggccgtcattgcccatgcccagcactgcggcgcaaggtggggggctatgggtgatctgaaggttggcgtcatggacgcattggttcagtgttttgcctggtcgtatcaggggcaggaaggtggcgtgcttggcgtgttccagaagtgtgtgtcgtaccagccaagcgttactgtctttgtcttgcggtgatagccagcgttcgtcgactaggccgatgtcgatcttggaccagtctaggggccgtgtggcgagggtttcgtagacgcgtgccggtgtggtgccaccagacaggagcagagaggcgcggccacgttgggtgatctcttggaggaggatgttctccaattctctcgtgacactctgtgcccactccagcgggtcgtcgtagttcatcaaggtgatgcgtgcgtcgtttggtggggtcatgccttgatgtcctgcgggactggctcggtgtctcgtgcgtatgcggctgcgccgagtaggccagggtgtggatggatcactgctaaagaggggatacgggccatgatggccgaaaatcgacccttatgttcaaatttttggcggaaaccggaatgctgtattgagttcaatagtttgggaacgaggccgcctgtcagaaagacgccatcccaagccccttggatgagtaccaggtcgccggtgatggcgccgaagatgttgcagaacagattgatggtgcgtgtggcgcgtatgtcgccgtcagcggcgcgcatggtgatgtcttgagggcgcagtgggcctgggtcgattccgtcgatttcgctcagtgcgcggtgaatgttgactagccctggaccggagatcagccgttcgttggagacacgtccgaattgttgtgacaggatttccaggatccggatttcttctggggtgcttggcgggaagctgacatggccgccctcggtttctagcggataacagcggccgttgcgaatcaccaggccgccgacgcctaggccggtgccggggccaatgatgccgtagttgcgggtggctgctgatagcgggacttgctcccatttggcactgccgatttggatgacatcttgagggcctaacacgctgatggccatcgcttgggcaacaaaatcgttgatgaggtgcagggtgtcgaagccgagcattgttgcagtgcgcgtgcgtgtgatgacccagggatgattggtaatacgtgcttcatcgccgtctacgtgtccggcgatcgcaaagacgcctttggtggtatgtatgccgatgtgatgcaggtagtgctgtgcagcttcgctcagtgaggggaattcgatgacggcgaattcgcgcaggctgtcgttcagcagtggtgctgaggttagggtggggttggccagcgcaaagcgggcgttagtccctccaatgtctgcgaccagtacgggagcctgtggtgcgttcatgcgtcgtttccatggccatcaatccccaatggcggcagaaattggtgggcttgaggtgggccccagctgccggcggggtagggttgcagtggtaagtcggacagttcccaggcattgctgacgctgtcgatccaatcccaggcggctgtgacttcgtcgtgacgtacaaatagcgccgggttgccgttgaatgcgtcgaggaataggcgctcataggcgatgtggcgatgttttccggtcgggacggatagctccaattccagcggttgcagttccagggttccccattcggggccggccaggctgctcatcaggtttagttcgatattttcctggggctgtagtttgaagcacaggcggtttggtgctgcattgttccggtctggacgttcaaatagccagtgtgtgacgggtttgagggtgacgacgatctgggttgagcgttcggccaagcgttttcctgtgcataggtggaacggtacgcccgcccagcgccagttgtcgatgtatgcggtgacaccgacaaaggtctctacattgctgccttccggtggttgataggctggcactggttggctgttaatggtgcccgcgctgtagcgtccacgcacgctgtgcattgcggcgttttgggcgttcagtgggcgtagtgcgcgcaggattttgactttttcgtcgcggatgcggtcggcttccagagaggccgggggttccatggcgaccaggcataggagttgcaggatgtggctttgcatcatgtcgcgtagtgcgccagcacgtgcgtagtaagcattgcggccatcgacgccttcggtttcggcgatgaggatgtgtactgactcaatgtggtttcggttccataccgcttctagcagggtgtttccgaagcgcagtgcgacgaggttctgcactgctgctttgcctagatagtggtctacgcggaagatgcgatcttcgtcaatcagtgtgccgatggtgtttaggatttcgcgtgcgtttattgagtcgcgtccgatcggtttttccagcatcaatcggtgtggtgtctgcagtgcccctccctgtgccaatcctagggcggtgttggtgtacaggcctggtgggattgccaagtagctgatgcagggatgttccgtcagatctcggactgcttcggcgattgatgttgggtcgttcaagtctacggaaaggtagtcgacacgttgtagtagggcttggatgtgcgcagtgttggcgatgggtagtgcttgttccaagcgcgggcgcaggatgtcgcggaattgtgtggtgttatggggcgacaaggccagagcacgaatgcggaagtcttgtggcaataagccatcagtaaacaggtgcagtaaggaggggaagagatagcgttgggcgaggtcgccggtggcgccaaacaataagagggtgttgtgcatggacctggtctcggattcagatgttaacgttggttggtgtgggggtgtttttgtttgcgtgagcaacatgtgttgatgcgtcgcttaatcgttgcgcttggtggtgtatgtgctagggctgggttggtggaggagggatgggagcgggtgatagtgcgaacccgcttgtgatttcttggcatggatggcacaggcgggcggtgatttggtggtgtgatgtgaaaatgatgtcaatgtcatgtcagaatcgctagatgcggctaaggccgcgcggatccggttgctttcggggccgggacagcgatgtttgttccgttgaggcttatggcatggccaaagtgcagttggaagcgatccgtaaggtgtacgacaacggccaggtggtggtgcctggagtcagtttcgaagttgctgacggtgagctgatggtgttggtgggaccgtcaggatgcggtaaatcgacgttgttgcgcatgatcgctgggctggaagatatcagcagtggcacgttgcgtattggtgagcgtgtggtgaatgacgtgccgccgaaggatcgtaatgttgcaatggtgtttcagagctatgcgttgtatccccatatgacggccgctgagaatttggcgttcgggctgaagctgcgcgggtattctactgaggccattgccgagcgcattaagaatgtggccgagatgcttggtttgacttctctgctggataccttgcctaaagcgatgtctggtgggcagcgccagcgcgttgcgttggggcgggcgatggtacgtgaatcagcagtgtttttattggatgagccgttgtccaatttagacgcaaaactgcgtaacagtgtgcgttccgatatcacgcgtctgcatcgcaaacttggcacgacgatgatttacgtgacccacgatcaggttgaggcgatgactctcggtcaccgtattgtgttgctcaaagatggagtgatccagcagattgataccccgatggtgctttacgaccatccggcgaatctgtttgttgctggttttcttggtaatccagcaatgaacatgttgcctggtcgattggaggcggttgcaggtggaatggagctgcacttggaatccggtgagtgcgtcatgtttgttggtgcgattccgaagtcagtttggttcgggcgtgatgtggtgttgggggtacgtccggagcacatacggccggcgggtcttggtgaaccagtggcattggaggcgactgtcgaagcgttggagccagtcggtaatgaggtttttttacatctgcgctgtggtgccttggcactcactttgcgggtgccgcctcaggagttgccggggatcggcgagtcattgccgttggcggtgcagcctgatcggttacatgtgtttgacgcggtttctggtgaatgtttggccggtcattaaggtgtttcaatgtgtggcttgatgcactgtgtttagtatttggtagatgtgtttttgacagtttccatccttacatttgtctcaagtgtgaatgtggttcggttccagttgatgggcaggcgagtgtcgccggatctgcctatctcagcgtgcaagcccggcgacgaaaggaaggggtgttgccagtgttccggcgactctgagttcaccgtattctgtgtctattggaagtactgcgagtgctagaccctctgcaacgctggccacctggccgatgtcgccctctgcgcttttgaccgtttcccctggctgtacatgagtattgatggccagtagctgagcgcggcgtttcgctttgccgaggaaatgagtacgtgcaacgatttcctgcccgggatagcaacctttgcgtatgctgtaggcattcagcccgtctaggccgatctgctgtggtgtccattgatcgcgttggcttgcgtccaggcgtggcagtcccagtcgtaaatctgccgcacgccattgcgcctcgaatgcggggacccgtggtggcatggcggccgttggtactagcagtagtcgtcttggcagagtgattccgctaacgtccaattcggtgattccgtccagttgtgctgcttgcgtacctgtcgcgtgtaccggtgtgtcgtaagttccggttgtaatgagatcccgctccacagcgatctgtactttacgtcggaagatatagcgctgcagttgggtggccatcatcactgcttctccatcgggcaggatcaacagtaattcgttctcagcaggacgatataaggcgaacagtgcagtgacacgtcctttcggagtcagccaagcactccagtgccacttgccgatggctaggtcttgtgcatcgctgctgaattgggcatgtgcgaagctcagtgtatctgcgcctgaaatgcgcaacatttcatacgatgggagtgggaagagtgtctgtccgttgctttgaaggttgtcagtcactggggagaggaatagaatcgcagccggtttgcaggggattatagggatagaccgcactgccttgcaggttcttttaagatgcttagtaagcgtttttgccgaatgtatacaggatgtatacagagatcctagttatatgttcagataacgatgcggatcggtattttgagtgtcgtgaaccgcggaaagtttgttcttgagtttgatccatttccgggtacaaaaagtttcagtgcattcttgtgatgatttgtgatgtcaggttcaggtctatcagagttccaacaccttattgacggaaaacgtatgttttctgtctgtcctgctccccaggattcccaggaaatagccaaaaacgcaactgccgatctgaagcaacgatctgatcttgaagagattggtgggcgtggtggattggatccggtgcgttatggggattgggagaaagatgggcgctgtattgatttctgattgcagtttcagtcaacgcggccaatgtgctgctcacccgggataacgagttctaccatggcgacccgagaacgccctctttcacctcatttgcaggtctaccgctggcaaatgcaaatggttacgtcgattctgcatcgtgcgactggggtcttcctttcgctgggagtccttgtcatcgctgcaggcttgttggcgttgatgtttggcgcggcgacttgggattatttccgaagttgtctcaatctctggtacggccaatgtttcttgctggtatggacgtggtgcttcggttaccacttgtgcaatggtatccggcatattgcgcaggactttggttgcggttttgctatcagcagctttgttcgttccagttgggcttccgtactcggtagcatcgtcatcaccgctggtgtatgggtctatgtggttgctggccggggtggtgtatgagtcgttaccgtacaccactcaaaaatgcccgtggtctaggtgctgctaaggcggggaccgggcattttgtgttgcagcgcctcactgcgattgcattagtattgctgggagtatggtttttggcatttttgctgactttgcttggtgtcgattacgcggcagcggttgcagccgtcgccaaaccttggaatgcaatattgctcattggcttcctggtcgctgccttttggcatgcgcagctcggtttgcaggtggtacttgaggattacatccacaattcttttctggctttggcactccagacgatggtgaagttcatcgctgtgcttggcgctgtcgccagtgtttttgcggtcgttcgtatcgcgcttgggaactgataattcgatgtccgcttatacaattaccgaacacaaatatgacatggttgtcgttggtgctggcggtgctggtctacgtgccacgttcggtttggctcagaaaggcttgcagactgtctgcctgacaaaagtattcccgacgcgttcgcataccgtcgctgcgcaaggtggtatctccgctgcgcttggtaacatgggagaggatgactggcgctaccatttttatgacaccatcaaagggtcagactggctgggtgaccaggatgcgattgagtacatgtgccgtgaggcaatcccggctgtgatcgaactagaacactatggtgttccgttctcgcgtactgcacaaggcaagatttaccagcggccatttggtgggatgacgacacgttacggtgaggggccgcgggcagagcgtacctgcgctgcagctgatcggaccggccatgcgatgttacataccttgtaccagcaagcattggcgcacgacgcgcgtttcatgattgagtactttgcacttgatctgatcttcgacaacgagggtgtgtgttgcggcgtgttggcgttggacatggccgagggatccttgcacctgtttcgtgcccatggagtcgtgttggcgaccggtggctacggtcgcacgtacttcagtgcaacttctgctcatacctgtactggtgatggtggtggcttggtgatgcgtgccggtttaccaatgcaggatatggagtttgtgcagttccatcccacaggaatctatggggctggctgcctcatcaccgaaggagtgcgtggtgagggaggaatcttgcgtaactctaacggggagcgcttcatggagcgctatgcaccgcactacaaggatctggcctctcgtgatgtggtgagtcgctcaatgattattgagatccgcgaggggcgcggcgttggtgaacacaaagaccatattttgcttgatttgactcacttgggtccgagcatgatccaagaaaaattgcctggcattgccgagagtgcccgcatctttgctggcgtggatgtgaccaagcagccgattccggtgctcccaacagtgcattacaacatgggtggtattccaaccaattaccatggtgaagtggtgcgtaagattggtaatgatcctgatgcagtggtgccggggctatatgcggttggtgaagcggcttgtgtatcggtgcacggtgccaatcgtttgggatcgaattcgttgcttgatttggtggtattcggtcgtgcggttgccaatcgttgtgctgaaacaatcaagccaaatcagccgcataaggtgttgccgtcggatagttgcgacaaggcactgggcttgcttgataaacttcgccatgctgacggttccacgccgacagcggtgattcgtgacaggatgcaacggaccatgcagtctgatgcttcggtgtttcgtacgagtaagacgttgcaagaagggtgcgaaaagatgaatgaaatctttgccttgtttgatgacgtcaaggtttctgatcgttcacttgtttggaattcggatttgatcgagacctacgagctgcacaatttgctgttaaacgcactggctacgattaactcggctgaacagcgcaaagagagccgtggtgctcatgcgcatgaagattatccagatcgcgatgacgagaattggttgaaacacacattggtcagtgtcgacgaaaagggcacatgcagttttgactaccgcccggtgcacatgtacacgctcagcaaagacgtggatgtgatacctcctaagccgcgcgtctattgacctagctggatataaatgtcatggcagagttcactctccctaagaattcgaagatcggtaaggggacgcatttccccgccaaaagcggtactaaaaatgctcgcacctttaaggtctaccgttggaatccggatgatgatgccaatccgcataccgatacctacgagattgatctagatacatgcggcccgatggttttggatgcgttgatcaagattaagaatgagattgacccgactctgacgttccgtcgttcttgccgtgagggtatttgtggctcatgtgcgatgaacattgatgggaccaacacgttagcttgtaccaaggcgattagtgcctgcaccatatctgagatcccgatctatccactgcctcacatgaacgtgatcaaggatttgatccccgacttgactcacttttatgcgcagtacgcttctattaagccctggatgcgtactcagaccccgccgccgcctgatcgtgagcgattgcagtctcctggggaccgcaagaagcttgacggtttgtatgagtgcattctatgtgcctgttgctcgacgagttgtccgagttactggtggaatggtgatcgctatttgggtccggcgatcttgctgcaggcttaccgctggattatcgattcacgtgatgaagatactggcgcgcgcttggatgatctcgaggatccattcaagctatatcgctgtcataccatcatgaattgcacgcgaacctgtccgaagggattgaatcccgctcaggccattgccgagatcaaaaaactgatgatgctgcgccgtgcctgagaccaaagaatgcgaataggatgcagtagtcaccaaacgaaggtagtactggcgttaaattgacgcttctgctgcttgtgctattgcggatgccagcgtgctactgccgaggaaccgacgatggatgaaccggctgaattgaacaaactacgttggcgtagccgacgtgggatgcgtgaattggatcacttgtttgatcgctatctctcacatcgctgggcgcaagcatctgaggcggagcgcggtgttttcctacgctttttggattgtgaggacgataaattgtggcgctggttgatggggtacgaggtttgtcaggatgcgtcgtttgccgctctcatcgttaccatccgggccttgcctgcttgagtggtcaccgtctcaatggttgttggttgcgttgtttgctttgacgctactggcttgcgttgcgctgctacggtgtgacttaaatgttaccttgcgttggagcggtgtcctattggccgcctgcggtggtgcttgggagctgcgccgtgttgtttgtcacccttgttgtgtcttgctgattccttctggcgatgaaccacctttcttcaaccagatgccggttacagaattgcacgtctcctggtacggcccgttggtgacggtttcttggcgtgttccgggtcgctgccgtatgtatctgttgttttggccggatacattgtcggtagccatgcggcgtcagttgcgtctggtcatgcaagcgcgtcagctttcgtcccaggtgctgtcaatggcaccatagccgcttcactatcagttgggtcccaatgtttaatccgctttctgttgcgatcggtttgcgttatctgcgtgccaagcggcgcaatggtttcatctcgtttatttcaatggcttccatcctgggcattgctctgggagtgactgtcttgattactaccttggcagtgatgagcggctttcagaaagagattcgtgaccgactgttgcaaatggctgcccacgcaacggtgagtgcgcagggagcaccgatgcatgattggcagcatgcagttgcgttggcgatgactgatccccgcgttgctggtgctgcgccgtacatcgagagtgaagcgttgctccagggggagcgtcatcagccggcgatgatgcgtggcatcgtgcccaaccaggaagacaaggtttcggtgctggcgcagaaattgaaggttggttcaatcgatagtctcaagcccggtgagtacaacatcctgcttggtaaggagttagcgttgtggttaggcgttgatgtcggggacagcgtgatcgtgctcctcagtcaaactcagaccactccagtggggacgatgccacggatgaagcgctttaccgtcagtggcctgtttgaagttggctacaacgaaatcgaccgtggcttagcggtggtcaatatggaggatatgcagaaggtcatgcggatggacggtgtgaccggcgtgcgtttgaaattgcacgatatggatcatgcctgggacgttgcgcgtgacttggcggtccgcctgaatggcccctatctggtgagcgactggacgcgcgaaaatgccaatctgtacagttcattgaagatggaaaaaacggtgatgggcattttgctctccctgatcatcgcgatgggcgccttcaacttggtgtcctcgcaggtgatgttggtcactgataagcaagccgatatcgccatcttgcgcaccttgggtttgtcgccagcaggggtgatgcgagtatttatggtgcaggggtcgttgattggcatcatcggtacgctctctggcgtgatcggtggtgtggtgctgacttggaatctggagcgaatcctgaaattgattgaatccacgttcaacattaccttgcttccggaggatgtgtattacatcactggcctgccgaccgatatgcagttccctgatgtggtagtgattactttgatggcgttggtaatgagtttcattgccaccttgtacccggcgtggcgtgcagccagaattcagccagcagaggcgctgcgttatgaatgagcgcagcactccgcaggcattgaccggcccggtgattcgagccgagcgccttggaaaaacctattctgagggtaagttactgacccaagtgtttgatgggctggatttgcaagtcatgcgtggcgaaacggtggcgattgttggtgcctctggtgctggtaaaagcacgctgctgcatttactgggtggactcgacgttccgactgccggtgaagtgtacgtcgctgggcaacgtatgtcggcgttgtctgatggggatcgtggtcgcttacgtaacaaaacattggggtttatctaccagttccatcacttgttgccggaatttactgcattggagaatgtgatgatgcccgtgttgttgtctggtcagagtgtatgcagcgggcagatgcgcgcacagatgttgttggaagcggtcgaattggggcatcgtctgaattacaagccaagtgagctatccggaggtgaacggcagcgtgctgcggttgcgcgggctttggccaattctcctgattgtgtgcttggcgacgagcccaccggaaacctcgacaatcgtaccgccagcacggtgtttgaattgatgctcgaactcaatcgtgcgcagcgaaccagtttggtactggtgactcatgatcgcggcttggcaagatgcctggatcgggtactggagttgtatcaaggtggtttgcgcgaattgacctcagcagaagtctgagtgtggagtcccgggtgtgtccttgcatgccttggttctgtttttggtggttaacgtggtgcggctgtgatgttcccaatgattccaccacgataatgccaatcatgatgaatgatggtgcgggtccgtgagaacggaccgatcatgatacggcgtcaattcttacagccgcatgcgctgatatccactacgttgcttaatctaagtgaactaggctgacttcgatggccgcatcgccagtgcatgacggttgcctggatctcaagaaagtgatttgtgaccctttctaaaagaacggagcggtgatcgaaggatgtgatattggctgcggtcgatgccggtgacgatatggacgatatgaaacccgagcagcgacacgtgttgcagcgatgttgggttgacgtgttaagtgtgacccggcacgcaacctgcttgcgttacctcgggtttccggcgttgttgccgagtgctgttgcgttgctgttgggttgtcttgctgcgctcaccttgccgcgattaccgcccgtatgggtgttgtggatttttctgtttgccggagtaatgctcgctgttgtcgtgcgccgtgttgcttggtgcggtgtggtgttgtttggttttgctaactgttgcttgcatggtcagtttggtttgcgacatcaattgtcgttcgcgttggagggccgcgatctggtgttacgtggtcggatcgtttctttgccggttccagagaccaggcgcacacgtttcttgttgcgtgtggataccgatcaagatcaggaaccagcgctgcgtggtcgactgctgcagttatcctggtatgacgagaataaggtggtagcgccggggccacgcaatgcattgcatgctggatctgtatggcagttgcacgtgcgtttgcgtgcgccgcacagtttgctgaatcccggaggtttcgacagcgagcgttatgccctagcccaggggattgttgcgaccggttacgtacgtgcgccgacgatggcacgtgaggtggcggcagccactggcatcaatgcttggcgggaacggatgtctgtgcgtattgctgatgcggtgttgtcggaagcatcggtgtatttacgtgcgttggcgttgggtgatacccggggcttgtcccaacaggattgggaagtattgcgcgctacagggctgacgcatttgattgcgatctcggggttccatgtcggtatggtcgctggtgcctgtgcgttgcttgtgtcgttgctgtggcggcttttcccacatttggcgtggcgttgtccgcgaccactcgccatggcactcattgcggtaccggccgccgccggctacaccgtcctggctggggcgtcactgcccacagtcagaaccgctttgatgatcggcatcgtcgcattggcgcgcctcactcggcgtcgtgccatgccggggcatgtcctggggcttgccttgctggtcgtactggtttgggatccattagccattcttagtgctggcttctggctcagctttgccggtgtcgcttggttactgtggtgtatgcaagacggtcatgccgcgccttggcgtggcttcttatcggcacaaggtgttgcaacccttgggttattaccattcaccgtggctttatttggtcaggtttcgtttgttgggcctttcgctaacttgattgcgattccgttatggacctttgtcgttgtaccgctggcgttgttagggactgcgctggaagcgttagtgccagggtggggtagccccatgtggcgtttggggggaacttgtttcgaatggagttggcagctattcgaatacttggcacagactgatttcgcattgtggtggttgccggaatctgatggtgttgcattgtggttggccttgctgggagcgttttggttgctgttaccacgcggtacgcctggtaagtggctggcgctgttgctgtggttgcctttgttgtggcctgagcgtgagcgtccccgccccggggagtttgagatgcagatgctggacgtggggcaaggactgtcgattgtggtgcgtacctcaggccatacgttgttgtacgacgcaggtccagcagtgaatgatggtttcgatgccggtgagcgtgttgtggtgccggcattacgtgccagtggcatccgtcgcttggatgcattggtggctagtcatgctgatagtgatcacgtcggaggtttgcccgcggtcctgaaggcttatccggttgatatcagctacgctccgccggatgctccactcgacgtggagcgccgttgcagtgctggggacagttggctgtgggatggagtccagtttcgtttcttacatcctgcaccgcattcgacgtatttaggtaacgagtccagttgtgtattgcgtatcgacacgcgctggggcagtgctttgttgacgggtgacatcggcaaagtggtcgaacgtggtttattgagtcaggatcgtgagagtgtacgtgccgatgtggtggtcgtaccgcatcatgggagcgccggttcttcctcgcttgggtttgtccgtgcggttaatgcgcggttagctttggtatccagtggtgatggtaaccgcttcggtcatccgcgctgttcggtggtggagagctggagtgaaacggcagatgtgttgcttactgcgcatagcggcgcagtacggatttgggttggacagcagggtctgcagttacgtgaacgccgtgtttggcgtcgtcgattctgggatgcggtcgaacgtcgccgatccgctgctatcctatccgccactgaagatgtatccaaagagcgtcggagaaacgagacatgctggaactggtaaaggctggcggctggccgatgttgccgctgttgatgttaggtgttgttgcattggcgattgtgcttgaaaggctgtggactctgcgtcgtaatgaggtgttgccgtcggggctgggtcgggaggttcgtgagtgggtgaggcgtggcaaattggaccaaaatcatcttgagtctctgcgccgtaattctccgcttggtgcgctattggccgccgctttggatgtaaaaggtggcgtacgtgaaatgattcgtgaacgtattgaggatacaggacgccatctggtgcatcgcatggagcgttttctgaatgcactcggtacgattgcttctgcaggtcctttacttggtttgctaggtactgtggtcggtatgattcaaatgttcctgggcattctcgattatggcgtgggcgatgtgaatcagcttgctggagggattggcaaggcattggtttgcactgctacaggtatgattattgcgatccccgctctcatttttcatcgttatttcaaggggcgaattactggctatgtgattgagatggagcaagaggcaatgctcctgctggatgcgattgatggtcttcagattgctattcaaggaagaaatgccgaagtggcgcatcccaatgctgtcaccaaggattgatgagatgcgtatagggaatcagcgtctcgaagacgagccacacatcgatttggtcccgctgattgatgtgattttggttttgatcatttttttcgtagtaacgacaacgttcgatgcccgttccacgttgcaacttcagttgcccaatgccagcgaccagcataagtcggtgccatccaaggcgttaagcatactggtcaatgcggatgggcactacttcattaacgatcatgaggtattgcggaccgatgttgagtcgttgaagcgtagcattgctgatgttgctggcgatgaccgtgagcagaccgttctgctacgtgctgatgcgcgtactccatatcaggcggtggtcactgtgcaggatgcattgggccaactcggtttccggcatatcgctatcgccactgcaccagatgctaataaagttggaacagctcggtgaacgtcttatcaggggctatgcgttatgccacgccctggcggacgtaccgtcgcttgctgtcgtatgcgcgggagtatcgttggttactcgttgttgcggcgtgtggtgctttacttgaggcagttgctggttctacctttctggcgttgatgaagcccatcaccaacgaaacctttatcgagcgaaaccgtgaggtggccctgtggctgcctcttggaattgtcggtttgtttttgttacgcggtattgctggctatatcactgatatggcgatgggccgcgccgcgcgtagcattgctcgcgattttcgtgtgtgtgtcctgaccaaatattttcgtttgcctggtagccgttttgacggtgagccagtggcttcgatgttggtgcggctcggttcagacagtgagcaagttgcgcatgcggttatcgacgcgatgaaggtgatggtgcagcagacgcttcaggtgattggtgcgttggttgtgatgttgtggtacagctggacagtcacgctcgccatccttttggtcgctccgttgctggcttgggtcatgcagcgggttgctaagcgttaccgtcgtatcagccatcacatccaagagagtaatgcgcagctcatgcaagctgccgatcaagcgttaagcaactaccaggacgtcaaagtgtatgccgcgcaagagagcgagttggagcgctatgctcggttggccaatatcaatttgggtttggcgataaaggttgagtcgacacgtagtctctcttcggcggcggttcagttgcttggtgcggttgggttggcaatgttgttgctcattgccggccatgaagctttggccggtcgcctcagtccaggcgattttgtctcgttgatgacttcaatgatcgcggttattcccgcgttgaaacagttgaccaatgtacagaacatgttgcagagcggtattgcttctgcacaacgtctgttctcggtactagatagtcctgatgagcttgatactggcagacgaccgttggggcgtgccagaggattcatcgagttccgcgggatcaccgcacgctatcctggtcggtctgctcccgtgctggatagtgtcagctttgttgctgcaccgggcacggtcactgcgattgttggtcgttcaggaagcggtaagtcaagtttaatcaagttgattccgcgtttttacgagccggagtctgggcagatattgttggatggccatccattacaggattatcttttagctgatcttcgccgtcagattgcattggtaggacagcaggtcatgttgttcgatggcagcatcgcggaaaatattgcttatggtgagatgcgtcaggtcgtttctgaggagattgaacgtgtcgtggttgatgcaaacgctcaggactttgtgaaccaacttccagagggattacagtttcaggttggggttaagggggggcgtctttctgggggacaacgtcagcgtttggccattgcgcgcgcgatgctgaaggatgcgccgattcttatcctggacgaggccacggctgcgcttgataacgaatctgagcgcttagtgcaggacgcgttgcagcgcttgatgccggagcgcaccacacttgtgattgcgcatcgactgtcaacgatcaagcatgcggatcaggtgttggtgatggaccaggggcgcatcattgagtctggtacccatgtcgatctgttggcacgtgatgggttgtacgcttatttgtacagcatgcaatttcgcgaacgtccaacatgagtagtggacgtggtcctaggattcctgagtattggtatgggcaggttccggtgccgccattcatgcggttcatggaggtcatttatgctggtgcggtcagtttgcgtcgtttggcctatcgccgcggctggcggcgtcgctatggagtggctgtacccgtcgtggtgatcggtaacttggttgctggcggtactggtaaaacgccgttgaccatcgaaatagttgcacgcctgcgtgaagcagggtggacccctggcatcgccagccgtggttatggtcgccgtgatcctaagactccccgctggattcaaccagatacgccaattgaattggctggcgatgaaccagcaatgatcgcttggaaaaccggcatgcgtgtgcgtgtggatgttgataggagtgcggcagcgcgtgctttggttgcggaaggctgtgacatcgtggtttgtgacgatgggttgcagcattatcggttgatgcgtgatatcgagattgaagtcatcgacggtcagcgtcgttacggcaatgggcatctgttgcccgctggtccgctgcgtgagccgatggtgcgtggtcgcctttgcgattttcgtgtgctcaatgcaggtcagtacagtgatcgaccaacgtctgggtttggtcccggtgactggcagatgcgtttgcacattgatcacgtgcagtcgttacaaggttcccgacggcggtcgctggatgccttttctggacaacgtgtgcatgccgtggctggtatcgcacatccggaacgtttttttgcgatgctgcgtcagcgtggtattggtgtggtgccgcatgcatttccggatcatcacttttatcgggcagaggattttacctttggtagtcgacttcctgtgttgatgacggacaaggatgcggtcaaatgccgtgcatttgctgacgattggtttttcagcgtgccgttgcgagttgagttgccgacggcgttctggactgctctgtttgatcggctagaacgccttgtttcgtgttgagtatctcgcaaatgatttctcttgttcttcaaaatatggagaggctctcagcagtgggtttcaatcgtctgaaatgagcatgagtgcgttcaattgcgtcgtgtcgggctggctgtagttgcgtggtttgatgctgactcctgagtgatgcacaaagcttgttgtgtttgtcgtcgcgtcgaggtgcaacatgtggtagtccagggcgatctgaatctctcatctaagaaaacgtgatttctcggagttcaatgttctgctgactgtctttgttcggtttggatagctgttgatctgtcacatctttggagcagataggctccaaggccgacaaaaagatgaagccagtatcgcgggcgtttaagtcatgcctctggagaggtgtcgatccacgtgccacagctgaattagaagtgtattggagccgttgctgccactggtggtagtacggctctacttgattcaaaatgcgtagctgccattagaaacattgcgttttctgctgcggttggtgggtcgaattgacgggtgttgttttggtgcacagcgttcatgctgttaagcgtaagtgttgttgttacaacgatctctatttatacgtgtcagtcggtgtacgctggtggtgtttcttgacgcgaggcatacatgaaaacattcgtagtggccggctccaagggtggcgtgggcaagacgactattgccaccaatttggcggcgcaggcggcgttgcgtggggtgcgtactgtcctggccgatgcggatccgcagaaatcgtctacacgctggactgagcgccgcgctaacctggatagtcaggtgctttcaatcaatgctaatggtgccaatgggtcccatcactggcgcaacgatttacccgccaatacggatctgcttattgttgatgctcctgctgggatgtttgccgatgatctggagggttttcttgaacaggctgatgcggtgattgtcccagtgatggcttcggcactggatattgaggcagtggtgggtttcttgaacaccatggctaaggtgccacgggtgcatcagcgcaagttgccggttggtttagtgcttaaccgtgctcgatcccggactcagaccacgcaacaagcaatgcagatgctgggtgactggccgtatctgttggtggcgcaattgcgtgatagtcagttttatgtggtgctggctggtcaggggcgtagtgtgttcgattaccgttctgctcaggcgcgcgagcatcagcaggactggaagccgctgttgcagtggctccataagctgtaggtggatatagcacgtcgtgatgcgtgaactgatcttgttgcgtcatgcgcatgctgagccgactggtatcggccagactgattttgatcgcccgctttcccaacaaggcatgattgaggcggaagccgctggacactggttgtgtaagcagcgtttgattcctgatcgggtgttgtgttctccggcgcgacgtacgcgtgagacattggaggcaatagtggcggtgctcggtgatgtcgagcaatgcttagaggagcgcctctacgaggcaacagcgggtactctggtggcacttgctgatgagtgccgggacgtcgatcggttgctgttggtcgggcataatcccagcatggaacagttggtctcgctgatacacagcaacaagaccagtgatgacgttgggatgcctactggctcgattgcgttgctgacgttgccattgaagacgggcattgaactggacaccatctgtctgactgcgctctggtggccgtgacgtcatgtctgcaatgctcatgtctgcaatggtatggatctttattttgttttcggtgttacctgtctcctgggcggcagcgcagcagcgattgacgctggattcagtgcattcttactttgagttcgaagtccgtactcgtttagggcagagcattgatggggtgttccctcgcttagaaggtgaagtggtgagcttgccggaggggcgcgagaaagtacggttgcacctgtatgcaggcgatgcggtcattcctggtagaacccattacactgattgggtccgtggagagcattttttcgatgcccagcattatccgacaatcgagtttgaatcccagccctatccctctcgggtgatgctgcaaggaggcaaaattagcgggaatttgacaattcgtggtatcagccgtgaggaaaccttgcaaattcagccagctgcctgtgctcggcctggttatgattgcgacgtggtcggcactggtgttgtgttgcgtgggcgctatggcattgaggattggcggttaatacttggcaatcgggtgactttccgttggcatggccgtctgattgaggggccgccaagtcattgaatatattcatacgtttgttattgctagcagctattttgttgggcagtgcttgcgctagcttgtcgcatgcccagttggatcatgctgcgtcggttgccgtggctgcgcgcccggccacgctggattgcgacaggcccaatcattgtgcgttggattcgccgttgtacgcgcttgggagccgagcgctgagtgaatctacgcctgtgacaccacttcactatgtgaccatcctcgataaaggcgagagcgcgttggttgcacggatcaatttgatccgcagtgctacccgcagtatcgatatgcagacttacatttttgacaaggacgatagtgcccggttgattatggatgagctattgactgctgctagacgtggtgttcgagttcgtttactgattgaccagctttcggcgatttctgatctgaatattctgggtgccttggctggtgcacacgttaatttccaactgcgtatctacaacccgatttttggcaaagccaagctgaactatggcgactatgttgccagcgtgctgtgttgttttcgtcgctttaatcagcgcatgcacaataaattgttggtcattgatgaaatgatcggcgtggtcggcgggcgtaattaccaagatgactattatgattgggatcttgaatataactttcgtgaccgtgatgtgcttgtcgccggaccggcggtgctgcaaatggcagttaactttgatgcgttttgggcggctgagcgcagcgtaccggtagagtgcctcagggatgttggacgcatggtgctgcaggatggggtgccgatgctgccatcagctgtcttccatccactggaacgggtccagcgtgttactgctgaggccaacgatccggactatgtcaagcgtacctttgtcgatcctgccttggctgtgaacaaagtgcaatatgttgctgacctgccgcaaaagcatcgccatgagcacaatgcaaatccggtttccattgggccacggttggatagtttgatttctaatgcgcgtcatgaggtgatcttgcagaccccatatctggtgttatccaaaccagcgctgaacatcttccgtcgcctcaatcggactcaggacaaaccgcgtgtggttgtggtgaccaacagtttggctgctaccgataatcccatcgtctatgccttattttacaaatacaagcggcgtaacatgcgtgacctggggttcgacatttacgagtacaagccgtttccgcaaaatccgccaatcgacctgacgggcgttgttccgatggatggatggaacaatgactctcttcagacgcgacaggaccttttggctgctgccaaagtctccgatgattcagacaatgctcgtcagttaccctcgcttgaaaataaaggtcaagtggataggcgtgtgttacgtactgaaacgcgtccaccctttttgggcattcacactgtcaataaaccattgcctgtgactcgcccgggcgcacgcatgggcttgcatgcaaaatcattggtggttgatcgtaaggttggggtgattggtacccacaacttcgatccgcgcggtgagagttacaatactgaagctgttgtggtgattgaggatccagcgttcgcccgtctgctggcttccagcattgagggtgatatggatccaggtaatgcgtgggttgtggcaccgcggaagaagttacctgggctctataagctcaattattcggtaggtaaactgtctgaggcattgcctgtgctggacctgtggccttggcgttatgcaaccaactatgaattcaaacccgggttggattgtccaatgccattgccacgttgggatccgagttttatgcaatgttatgaacctgtcggtgactttcctgaagtcaatgttggtccaaagtggttgttggtccggatgctgattgcattcggtgctgggctggtgcctatcttgtaagctgttgggtgatttgttccacgatcgttgccacagatcgcaagctgaaccgtgtagcagtgtttcgcattatttaataacggattgaaggtctcatgactttcaaagcttcatatataggttctggaagctagattcagtggctgtgttcgatcaattctaagtgatgttgcatgattacattttattgaatagctcattcaatacgctgaaaaattgaggatgagatctaaaaaataaataaaatcgatctctggaattcttattcttattcttattgatgtgatttttatattttagataagtattttgcatcccttttgttatgtcagtgcatgttagcttgatttgcttacttgagaaatataactcgccgatccaaaccaatggatgccatagagcagttcatctactcaatagatgtttactcgtctaacctgggtttaattcgtttcaatcgtgggtgtggttgtctgcgctttatcctgaatgctgttccaatagcacagcggtgcgtctttgatgtcacgagcagcagcgcaattagccgtggctaacgcggtggctatattggtgtgttgtggtcctgtctgtggtgttgcttagcatgtgatggctcgtgcggtgaaaggtgcattagatacttgtgattcaaaattaatgtaattcgtgttatttaatacgattattgttctttattcacgtaattcgtttcttatcaataagtatttcgactattttgtgcgtataggcgttgtcggcttttagcttgatgcaatcacccacaccgctgtaataatcgtcaaaaattgcgaggtatgcgggttttttgccgcaatggagaaagctagcaattagcactgcgctgacagtgctatcagcgcttttcaggattcagtggctagaacgtcgttacagagatggctaacttttagatgaccagcaaggaaaagggcgactagcgagacaaaactactttagtacttcttaatttcggcttttataatcaatcggtcgtcttggaaatcggtcgattgagcatccgtaaagtccagcgatcaatttccctttttctttcttcgctcgataattcatatttctgcgctaaataagccgcgcgcctggacattaagccaagtacatacgctgctggtatagtcccgtaaaactggcatagcgcatcaacaatcggaggagttggtaagcgggaaccgctttcgtaatcagagatagtggtgtgactaacctgcttatttaggcgtttactaaggtattccgctgcatctttttggctaattcgcggaatagcctctcttcgcgcagccgctaaacgctctccaacttctatagcgtaactatctctgttctttgtaggcatggcgtgaagtgtatgcgaacaacggcataacgtgtacatctcgctttaatagcgaacgtattacaaagtgctgccgagtatgtaataacgctgaagctattttaaagacggtgtgtcattggctgccgtttatcttaagcacactacaacgcgcacgacataaacgcgccgtaacattcacattaatgcagcgacctgcgcacaccgtggcctactgaataacacgcggtggtcggctgctgtttgccttgactcaaggaataaaacatatgtacgactctgataacgattttaagacatccggttaaacggctggcgaagatgtggcgcgcggatgggacgattaaggcttatgacaatgctaagttttttagtattgagcagcgaccgttaaataatcttcacgatgtcgcaacgctgttatctcaattagaacatgatccgtgtgcctgtgtgcctgtgtgcctgtgtgcctgtgtgcctgtgtgcctgtgtgcctgtgtgcctgtgtgcctgtgtgcctgtgtgcctgcgtgatgcggagatgcggagatgcggagatgcgatcgcgacggcacatgatccggacagcgataagaagcgtaattactacagcggttcattgtgtcgaaacgcctgcaaatgaatctcaagaacgtattgacactcttttctgcttggttaccaacagggttggtggcattggctattttctgtgagaaacatagacactgtgaacaggtggacgtagtacggcttagttggtttcgactttgtttttctaagcgtggcacacagtcactcaggtttcagaccaggtgatttttgcgtaccaacccggatcaggtatgttgctccacctatcagaggccatcatggccgcgcgcccaggttatttaagtactgtttgtttgatgcagtttggtgcggtgtgccgcgtgatagaagatcatcgccgtatcgggactctgactgtttggtggaggtgatttgccacgatgcggtctcatcgcgaatacgattcgtggcactgtcaaggtgtgtgacacttttagatccgctgtgctcggcaagcacaccagctgtccgtacgcaggtgtgatgatggcatcctaacgcggtgttattgcagtaggacgttgctatctgattccttctgtctgatcggtgtatgttcgcgttactctagacagtcagcaggcaataggtgttcccacagatgaggtgcgttgcattgacagtgtcgatgttggtattgcggtggcgtatttcgtaggaatgtggctgataggcgatcttggttgtgtttgctgcgtgtggtttccagcatgattcagattgtttcgaaacagtttttgatgatgttcttgcggaccttgttcggatgccagattcttccgttcatcgcgatatacacgcctgacgatagcgattgtagtgcgccgattgcgcagccgatgttgaagtgggcgtctgagccgtgaaaacgtgctggatttagtgcacctgtgatcacgatggttttattttggattgattgtagtcgcttgccggtttctaccattgaatcggtaccgtgtgtcatcagcacgtgctggcaggggtgtgcggtgattgtgttgtggattaattcgcggtcggcttcaaccatgtgcagtgagtccttgcgcatgattggaatcacgttgaagcggaaggcgatgccaagcgcttcgagaatctgggtaatttgtgggtctccgacttgatagtgtgatttttcgtcgaagtagattttgtcgatcgtgccacctgtggtgacgatcaaaaggtcttccatatgctgtggttctgtgagcaggtgatgagtaaacgaggcgttatgataagccttatgctcctaagtttgatccagtacgtgttttcatttgcaaatggagtaccgccgtcactgggtggcatgacctgcttgttggtacaggaggctatcagtagtgtgttcaggcggtatcgctgagcgtgttatcggtacagcgtattgtgccggatgtgcctgtaggtcagttgcttcgttaactgttcttatcgttgttgtgtcagtcgctgtgcgagatcggcaacgcgtcgaccaagtgcgcgtgctaacaaggtttcttcgtcggtcggttgtgtgttgtttgtggcgttggcgacgtggctagcaccgtaaggtgtgccgccgctacgtgtgtgactgagtgctcgttcggtgaatgggatgccgacaatcaggcagccgtggtgcagcagcggtaggtgcattgacaatagcgtggcttcttgaccgccatgcatggacccggtggaggtgaatacccctgcaggcttgccgaccagtgtgccgttggcccagtcgatgcctagcgagtcaaggaaatattttacgggtgctgccatgttgccgaagtgagtcggacttccgagtaataggccggcgcattcgtccaagtctgtgggtatcacgtagggtgcgccatcttccggtatgacgggcgcaagtgcttgggtgactgcagtgactggtggtacggtgcgcagccgggcggccatccccggtacttcggcaatgccgcgtgcgatttgtcttgcaagccgtgcaactgaaccgctatggctgtagtagagcaccagaatatcagtcatacgggaacctttttagaaagtgaagagtattgagcaggcaatgcgtcgtgtacattgagcagctctgaggggtgtgatgttgatgcatcggtataggaggcaaagcatcagcgggttgatagtgtctgtggggcagtatttaagtacttcctctcgtagtggtcggtggtttcagttctcttatttgcgttgctgctgttgtcctaacgttttgtgagattgcatttttaccgattatttaaaatagcgaatagcgaacgaagtggacatgagattgttgctgcatgtgttgtgatgcgtggcgacttggtgaaaatattcgatgcgtttaaacaagcattcggctgcattacatgcggggatgtgccctgacgattgcagtgtttcaacctgatgtttgagtgtggcgtaatacttttcttggcggtgctggagtgaagcggaagcaatggttcttcacatggatcgccgtcagcgtgccattgattggagtggatgtgacgttacatgcagagtatcctgcaacgcttgcctggggggctgagattcggtgaatgttgtgatgagtaatatatggaatttattataaagtcgctcctcgacactgacttatataaattcacgatgatgcaggcggtgttgcatcaataccccggggcacaggtggagtacaggtttaaatgccgtacgcctggtgtggatctggcgcgtttcatcaacgaaatctctcatgagattgatgggctatgtgcgctacgtttttctaaggaggaactggattatttgcgcggcttgcgcttcatgaagccagatttcgttgattttcttgggctgttccatttagaccgtaaatacctgcaattgcgtgcttcgacccaggtgtcgggcgagattgaattggatattcgtggcccatggttacatacgattctgtttgaggtgccgttgttggcgattatcaatgaggtttggttccgcaatacaagcatgttgaatcttgacgtgggccgcgcccgattggatgccaaggtgcgtttgcttaaaggcgagagtggttatgaagagtgcagcatcgctgactatggcactcgccgccgttactcgcggcagtggcatgccgagttgctgccattgttggcacaaggtttagggtcgaacttcgttggtaccagtaatgtttatttcgccaagcagtatggctataccccattggggacgatggcacacgagtatctacaggcatttcaggcattgggaccgcgcctgcgtgattcccaggtggcagggttggaagcctgggcgcgtgagtaccgcggcgatttaggaattgcgttgtcggatgttgttgggttggacgcgtttttgggtgactttgacttgtacttttgcaagttgttcgacggaatgcgccacgactccggagatccattcaaatggggagagcgcatcattatgcatctggagtcgcatcgtatcgatccacgtaccaaggtgctggtattcagtgatggacttgatatgaataaggtcatgcggttgtaccagcacttccgtggccgttgtcgcttggcgtttggtgtaggcacgagtttgacgaatgatctcgggccgacgccattgcagatcgtgattaaaatggtccgttgcaatggtcagccagtggcgaagctcagtgattctccgggtaaaagcatgtgcgatgatccagcgtacctgcattacttgcgtcaggtgtttggggtatctgccgatgtttgatttttatagcggccgctgcttgtggttttagatcggatactgcactcaatgcttgattgacgatcattgttttttggctacgccgttgttgtggctgagttgttttacattgtttgcgaatgattttgtgattcatattacaaaaaatggcgtgtacaacgcgggtgcatgatctgattcgtacgcaattactcgctcatactacggaacaatgccgcggcagccgcgcccagtgcggcaccgactgccacctcgcggcgggtatggcgacctagcgctagtcgggaccaaccaaccagtgctgttgctgccaataggctgacatctactggcagtgtgttgtttagtcctgtggccagaataccgaaaccgacgtgcagtgatggtttcatccagtgccgcacactgtgtgcggccaatacgagggcgatgccggcgactgggccggcgatcacctgttttggcatgccaagcgcccataggctgagtgtggcgatgccgagcagtagcagcaatatcggtaggagttgggcgcgttcgtttggtttggaggcatcaatatggctccaatatccacgttgaacctgccatacactgtaggccaatcccagtaccgtcactagcagcatagtactgatgacgacggtttttacgtgtgtacttgtcggtgtgttgcttagtttggtagcgattgcgaatgatcccagtacgccaggatggccgagtatggagatgatgcgggccaaaacgatgcgtgtattcattgttcctttcgttgcatccagcgtggatcaattatcatcaattttttaatagatagcatcacagtagtttagtgttgccgaatagccgcttcggagagcattcctgtcaggtgggctgttgtatttaaaggtgtggtgcaatttatcgtgctgttttttggtgagaatgaataccgatgctgtaggggtatcatctttgcatgatgtgtattaataaattttggtcacgttatctctgactctcggtgtgtgagtgaaagtgccgcaagatgtttcatagcggacacggtttcatggatgtgtgttggttaagagttcgaggcgaaatatgctgtgtctggctagatgagttgtgggttgccagggattttagtatggagaggatgtgtttgtgattgatgttgttcaatggtatgcgcctagatgtgttgttaatcggtcttccagaaatggcgcatgccaagtccatattttatttagatgagcggcttctgctgcggtttttttactcgatattctggaataactatggaaacgatgcattgggtaagtgcagttgtctttgtgtaatttgcatgattgttttcatcttttcgcgttgcaggattgtgagttgattacgtgagagcaattgaatattggcccgttatgatctttgtgggcactgtatatgatcgatacgtacccgttgtactcagaaatttctagagtgaatgtgttgttggggggcgagcaggaactgcaactgccatgagtgagcgtagaggatgatgctgatgaaccttagttcgaggttaagaaatctgcacgatgagaaatgtttgtgtattgatgatggctcaatgcactcacattgatcacgatcagtttaagctgagcgtggtattggattgtttggcgttggtttatatgtagtgagcgtataaatgtttacttttaggtatgagtttcatgatgcgtcggctgttttacgcaaagtcgctttctgtatgtgaaagcaaggatttgaatatgcagttgcagtcgaacatttttggagacgttccttgtctccagcgtatcgtcattgttgtatcgacgtataaaggcaacgtctcatagggatgctgttcatgatgcagtgaggtatgtacgtataaatatatttgacgtatggcgaggctctgcatttatttggagcgggacgatgactgcattaggttggtccgtatcatgcggttttgacgaatgacgattttttggagtcgggctgctcctccattggttgaggagcatgttttgaagcaccttggtttgtgcaatgaggtggttgcgttggatggtggtccagtaaatatgccaagcaatcggtgatgtttgttaagtaaagggcattctgtcaccaactataaatgttccaatatacgggtgaaacgatgttgcggtcgccgttgaggtggccatcgccattacgatcgtacaagtagtatgcaggtgcgtgtttcggggtgatcttgaccatacgtagctggccgcttacccggaattcatccacgcgatcaccgttttccataattttggtggttattacagctccacgtagttttaagggtgcatcggcgtgtatgtcgccctttgtgctgcagccagaaaatatgagtagggataacaagatcaggggggcgtgtttcatcgtggtcgatttggttcggaagtcagtggtaggtaagagtatgcgttttcgatgtcactgtggtgtgcagcgtagaatgcgctgatgagtaaattagttttaattgatgggtccagttacctctatcgtgcgtttcacgcattgccgccgctcagtaatgcagcaggtgaacctaccggtgcgctgttcggtgtggtcaacatgttgcgtactacattgaaggagcgcccggactatgctgctttcgtgattgatgcaccagggaagacgtttcgcgatgctcttgattccgaatacaaaatgcatcgtccgcctatgcctgatgatttgcgtgtgcaggtggagccgatgtgtgggattgtgcaggcgttaggtatcgatattttgtgtatcgatggggtggaggctgatgatgtgatcggcacattagctttagctgccgttgctgatgggattgcggtaacaatttctacgggtgataaggacttcgctcagttggtgcgcccaggtgtggagttggtcaacacaatgactggtagtcggatggactcggctatggcagtgatcaataaattcggggttgctccggatcagattattgattttttggcgttgatgggcgatgcggtggataacgtgcctggtgtggataaatgcggtccgaagacagcagcgaagtggttggctgagtatggttcactggatgcggtgattgccaatgcggacaagatcaaggggaaaattggtgacaatctgcgtgttgtgctgccacggcttttgttaaatcgtgcgctgattacaatcaagactgatgtggtattggagaagtgcccgcaggatttggcgctgcgtgagcgtgatactgaagcgctgcgtggtttttaccagcggtatggcttcacacaggcattgaaggaactcgatggcggtagcgttgcagtcactgtggctgagcaggagcctgggcgtgggaggaatgcgggtttccatgttgctcctgatgcatcggtggcaatggagattaatccggcgttgtctgcgcccggagagtacgagacgattttcacagttgagcagttgcaggattggattgtgcggttgcgggtggcgggtcagtttgctttggacactgaaaccgacagtctggatccaatgcaagcggtgctcattggtctgagttttgcggcagaagtaggatgtgctgcttacttgccgtttggtcatgattaccctggtgcgccggtgcagcttgatcgcgggcaggcgctggcattactgcaaccgctgctggaagatgctgcggtgcgcaaggtgggtcagcatggcaaatatgatatgcatgtgctgcgtcgttacggcatcgtgctcgctggttatgccgatgacactctattagaaagttttgtacttacctccggtcatgcgcgtcacgatatggatacgttggcgaggcgccacctcggttacgagacgatgaagtatgtcgatctggtgggtaagggagctaagcagattcctttttcgcatgtgggggttcaggaggcgactcggtacgctgctgaggatgcggatattacgttgcgcttgcactgtgtgctggcgcccaagttgttggcggagccaagtttggagcgggtctaccgtgaaatcgaaatgccactggttgctgtgctggagcgcattgaggccaatggtgtgcagattgatgcagaggagttgtataagcagagtgctgatttgtcgcggcggatggttattgcgcagcaaaaggcgatggatttggcagggcgtcacttcaacttggattcaccgaaacagttacaggtgctgttgtttgatgagctgaagttgccagtcgtggtgaagacgcccaaggggcagccatcgactaatgaggaggcgttggaggcgattgttgatcagcatgcgttaccgcgtgtcattctggaatatcgcagcttggccaagctgcgcaatacctacactgagaagttgccggagatgattcatccgcacaccgggcgtgtgcataccaattaccatcaggccggtgctgctactgggcgtttgtcttcctcagatcctaatttgcagaatatcccgattcgtacggatgatggtcgccgtatccgtcgtgcttttgtggcgccttctgggcgcaagttgattgcttgcgattattcgcagatcgagttgaggatcatggcgcatctttccggggatgcggggcttgttgatgcgtttgagtctggtgtggatgtgcattgtgctatcgctgcggaggtgttcggtcgtggaattgatgaggtgacgctgaatgagcgtcgtgcggcgaaggcaatcaattttggcttgatctacgggatgagtgcgtttggcttggcgcgtcagcttggtatcagccgcggtgaggcgcaggattacattgccttgtatttcgatcgttttgctggggtgcgtgattttatggaaaacacgcgtcagcaggcgcgcgatagagggtatgtagaaacggtgttcgggcgccgtctgtatttgaactccattgccagcggtaatcagacgcagcgtgccggtgctgagcgtgcagcgatcaatgcgccaatgcaggggactgcggccgatatcatcaagcgtgccatggttgcagtggatggttggttgggagtgggagggcatcgggagcgggcactgatgatcttgcaagtacacgatgaattagtgtttgaggcggatgagggtttcgtgccgacgcttgtacatgaagtgtcggcgcgaatggctgcggcagcgcagttgcgtgtgccgttggttgtcgatgttggcgtaggtcatcactgggatgaggcgcactgagtcatgtgtaagcgttgtttacttgtgatctatccatgatcttggatgcggtatggggggatgttgccgctatttaatgagtgattaatttatatcttcacgtgttatcaatgtataggtgtggtgtgatacgcatcggcaagtgcaatgcttgcctgtaggatctctcctaatcccctggagaagatcgttggagcggggattcatccccaatccccgcttctggcctcgccgacctaatcccctggtcagcgaggctttttatttgtttttctctgaatttttagaaatgcagtggttttacggcatggcaatggtgataggtcactgtccttgaggtgtttcgtgtttgatggtgttgtgtgcatgttgggtggcgtcatcattactttgatgttgctgtgttgtcagtttcagtggcggtgtctgttgcagtgccaagctatgttgatgtgattttcctgtcggtttggcggatgctaaaaatgttctggtctctgctgtcggtttgcatgtgattgttggtgttgcatgatgtggtaaaccgtcagggcttttgattcgcacggtgtttgaggggcgtcgttgtgttggacacggtgctatcttgtagggtgttgatagcgtggttgggttgttgcagtggattcttttcttagacttcttattcatggcgcttccgggcgcatgggacaggcgctgttgcgactggcctcagaagatccttcgtttcaggtggctgctgcggtggtcgggcaggcaccggatcgccatgtgagcgatggtgtgccattttttgcggctgctgaattggcggctgtgccggcgtttgatgttgcgattgatttcagtttgccgcaggggttttcgtcgttgctggcattgtgtgtagcgcgcgcggtgccgctggtctcggggacgactggtcttgattcgaggcagcatgaggctttggtcatggcaggggcgcagattcctctggtgtgggggtccaatttcagtgtgggtatggcggtgttggtgaatttggttgaacgtgccggtgatgcgttgtcaggttgggattgcgacatcgtcgagtcgcatcacgtccacaagcaggatgctccgtctggaagtgcgctgacgttaggtgaggcggttgcctgcaaggggatcgcgccgcgctatacaagcttgcgtgccggcgacattgttggtgaccatctggtgcagtttacggggttgggtgagcgcattgagctagtacaccgcgccaccaatcgtgatgttttcgcacgtggtgcgttgtacgtagcccggcgtgtggtggggcgtgtgcctgggtgctatcgggtgcgtgacttgattatgtgagttgatactcgcctttcagcttccgtgtgttgtctgtgtggtgatgttgggctggtacggggcgatgcttgccgttagaatcccagtctgcccgaatctagcttcggaccggtctcaacgccgtgttcgagctttcctgcaacctgatttcaggcggcggcatcggtgtcccaggcagccagagcgagactccacccgtgacagaacccgcaatcctagttctcgaagacggtaccgtattcgagggcgatgctgtaggcgctaatgggctttccgttggtgaggtggtctttaacacatccctcactggttatcaggaggtcctaaccgatccttcgtatgcgtaccaattggtcaccctgacttatccgcatattggcaatacgggttgtaccgatcaggatgatgaggcgaataaggtatgggcggctgggctgattgtgcgggatgtgccgcgtcgtccaagcaattggcgcagtcagatttcgttgtcagattggttggccgcacgcggtgtggttgctattgctgggattgatacgcgcaaactgacccgtattcttcgtgagaaaggcgctcagcatggtgcgttgatggctggtgagattgatgttgacagggctcaggatgcggcccgccaatttacaggcatcaaaggtatggatttagccaaagtggtcagtaccaaacaggcgtactcttggtacgaaggccagcttgacttggatcgtaacgaatggaagcgcgccgcgccgcaatataaggttgtggcctatgactacggcgtgaagctgaatattctgcggatgttggcggagcgtggttgtgatcttacagtggtgcctgcgcagactccggttgacgaggtgttggcgctgtgcccagatggggtgtttctttccaatggcccaggtgatccggaaccttgtgattacgccgttgcggcgatcaagacgttcatcatgcgacgggttccaatcttcggtatttgtctgggtcatcagttgttggcccagactgttggtgccaaggtcgtcaaaatgaggcatggtcaccatggcgcgaatcatccggtgcaggacttgcgcagcgggcgggtaatgattacgtcgcagaatcatggctttgctgttgacgaggcaacgttgccaagcaatgtcagggtgacgcatcgttcgttgttcgacgggaccaatcaggggattgagttgcttgatgtgccggcattctcgtttcaagggcatccggaggcttcccctggtccgcacgatgttgatgtgttgtttgacaggttcattacaatgatggcggctcaatcctgatggttttgatgtccgtcattagtgatgtgctggtggtggtggggcggtgtgcgtatcggtattgccgttgtcattggcgttacgatgcgatgtgagattcgcgtggcagtcgatcacggcgtcatcaatgctcagttgggcggccaggatgatttggttgtctgctgaggcgtaacaagattgattttactgaggatttcatgcccaagcgcactgaccttcgtaccatacttatcatcggtgctggcccgattgttatcggtcaggcttgtgagtttgactattctggtgcccaagcctgtaaggcgttgcgtgcggaagggtttcgtgtcgtcttggtgaacagtaacccggcgacgattatgaccgatcctgatatggccgacgctgtgtatatcgaaccgattcactggcggacggttgagaagatcatcgccaaagagaagccagatgcgctgttgccaacgatgggtggtcagacggctttgaactgcgccttggacttggccgatcacggtgtgctggagaaatatggtgtcgagttgatcggagccaagcgcgaggcgatccgtatggctgaggatcgtgagttgtttcgtgtggcgatgcaggagatcggcttggagtgtccgaaggccgaagtggctaaaagtttggagcgggctttggagatccaggccaaagttggttttccgacgatcatccgaccgagcttcaccctgggcggtaccggaggggggattacttacaatcgccaggagttcgaggaaattatcaagcgcggtctggagctttccccagtacatgaggtgctggtggaggagtccgtcctaggctggaaagagtttgagatggaggtggttcgtgacgcctcggacaattgcatcattgtctgttcaatcgagaacttggatccgatgggggtacatactggggattcgatcacggttgctccggcgcagacattgagcgataaggagtatcagcgtttgcgtgatgcttcgattgcggtactgcgtaagatcggcgtggatactggcggttcgaatgtgcagtttggtattgatccgcagaccggccgtgtggtggtgattgagatgaatccgcgcgtgtcgcgttcttcagcgttggcttccaaagcgactggtttcccaatcgctaagattgcggcaaaactggcggtgggctacacccttgatgagcttaagaacgagattaccggcggtaaaatgcctgcttcgtttgagccatccattgattacgtggtgactaaaatcccgcgttttgctttcgagaagtttccgcaagcggatgcacgtctgactacgcagatgaaatctgtgggtgaggtgatggcaatggggcggacctttgcagagtcgttgcagaaggcggtgcgcgggctggagaccggcaaggttggcttggagccgactggtttggatttgagcagcgaagatgatttggttgtcctcaagcgcgagttgaaagcaccgggggctgagcggttgttttatgtagccgatgcatttcgtgccgggttcgcagtcgctgatgtttacgcgttgtcttatatcgacccatggtttttggatcagattgaggagattgttgctgctgagggccgactggttaccgatggtcttggttcgatagatggggcgcgcttacgtcagctcaagcgtataggtttctctgatgcgcgtatcgcgcagttaaccggcacgaatgaggttgcggtgcgggcgttgcgccgtgtgctcaaggtcaagccggtgtataagcgtgtcgattcttgcgctggtgagtttgccactggcactgcctacctgtattcaacatatgaagaagagtgtgaggctgcgccgagtgatcgccgcaaaattatgatcttggggggggggccgaatcgcattggccaaggcattgagtttgattactgttgcgtccatgccgccttggcgttacgtgaggatgggtttgaaaccatcatggttaactgtaatccggagacggtatctacggattacgatacctctgaccgcctttactttgagccattgacgttagaggacgtgttagaaatcgttgaggtcgaacaccctgtcggagtgatcgtacagtacggtggacagactcctctgaagctggctaaagcgttggaagccaacggtgtgccggtgatcggcacgtctccggaatcgattgacttggcggaggaccgtgagcgcttccagaagctggttcagcaacttggtttgaggcagccgccaaactgtacggcgcgtaccgctgaggaggcattggtattggcgcgtgagattggttatcccctggtggtgcgtccgagttatgtgcttggtggccgtgcgatggagattgtctacggtgaggccgatttggcgcgttatgtgcgtgatgcggtgaaggtatccaacgattcgcccgtgttgcttgaccgtttccttgacaatgcggttgaggtcgatgtggatatcattgctgatcgggaaggtcaggtactgatcggtggagtgatggagcacattgaggaggctggtgtccactcaggtgactcctcatgttccttgccgccctattcgttatcggccgcgactcaggacgatttacgtcgccaagtcatcaggttggcgcaggcattgaacgtcattggtttgatgaacacacagtttgcgatccaatccaatgatgatggcagtgacatcgtctatttgctggaagtcaatccacgtgcttcgcgcaccgtgccgttcgtctctaaagcgacgggggtgccgcttgccaagattgccgcgcgttgcatgactggcaagacattggtcgagcaaagtgtgacttgtgaggttgtaccggcatattatgcggtgaaggaagcgatcttcccgtttgctaaactacagggcgtggacccgattctcggcccggaaatgcgttctacaggtgaagtaatgggggtgggccgcagttttgccgcggcgttcgcccgtgcgcaggaagccggcgatatccgtgccccgcaaccaggcagggcgtttgtttcggtgcgtgatcctgataaaaagcgtgtgttgccagttgtcttggccttggtggagcgcggcttcggtgtggttgctactgctggtacttatgcttggttgcagcagaatggagtggcctgtgaggttgtgaataaagtggccgaagggcgtccgcacgtcgtcgacttgattaagaacggcgagattgtttacatcatcaatactacggaagggcgtgcggcgattgccgactctttctcaatccgtcgggaggcactgcaacattgtgtgacctactcgactactattgctggcgctaaggcgttggtgaattcactcgagttccgcggtaccggcccggtttggtcgctacaggaactccacaaggagctgcaggtatgagagcgcccatgactttgaaaggtgtgcgtcgtcttcgtgatgagctggaacatctgaaatcggtcaagcgtccagagattatcaatgcgattgcagaggcacgtgcgcatggggatcttaaggaaaatgctgaatatcacgctgcgcgtgaacaacaaagctttattgaaggtcgcattaaacagttggaaggcgagctttcgcatgctgaagtgattgatgtcgccaagctcaatgcgggtaccaagatcgtgtttggtgccacggtgacgttagtcgatctggagactgatgaagagagtcgctatcagatcgtgggcgatcttgaggctgacatcaaacagggtttggttgcgatttcctcgccggtggcgcgtgcgctgattggcaaacaagagggcgatacgatcgtgattgaggcacctgctggccgacgtgagtacgaggtggttgcggtggaatacatcagctgattctgtcatgtccagtgccacgctgttgttaccggagcgtcattgcttgttaggtacgttgcggggtgatgcggttgcgcgggcgctggcgcgtgctgaccgtatcactgggggttgtggtgagcgtgctcaattgggacgtcactttgaacttgttcctgcgtcctggccagtggccgccttaacccgccagatagatgttggtgatgcggcaggtgcggcttgggtgcgtgcggatccttcctatgtgattccggatatgggtgcggcacggttgttggcctgtggtgagatgttggcattggacgctaaggaccgagctgcattgttgccagagttgcagaccttattcagtgaagccggtttgttgctggatgcgccaacgccagcacggtggtacgtgcagctgactccagaggcttgtttgcccgcattctccgccccggaggatgtccttggtgatgacctgtttaatcacttgccggatggtgacatggggcgttgctggagggcgttgttaaccgaggtccaggtgttattgcatcaacatgcgtggaacgttgagcgcgttgcgcgtggtaagcagatgatcaactcgctgtggttttggggagcaggtgtgttaccgcatacggtgacgacgccgcaccgacaggtgcgcagccgtgatgtgctgctgcgtgccttggcgaaggcctctggatctgataccgacagtttgcacatggtggatgcattggttgatctgcgtcacctgcgctcgttgacgcaatttagcgatgaggtagttgctcctttgttggcggcgatggggcgtggcgaattaaagcaattggtgctggattttcgggatggagaaattttgaccatgacccgtgcgcaccgttggcgtttttggtgtggtgcgcgtactcagctggccgattgagcgtgcccaagattattcgccgtctctctgtgccggtggccgtttggcctgacaatgtgccgccattgctgcgacgcgtgtacacggcacgcggttgtgccgatccggtgacggcgcaaccctgtctcgctcagttgttgtcacccgccacgctgagcaacatccaggcagccactgtattgctgacccaggtcatcaaggccaatgggcgtattctggttgtcggtgattttgactgcgatggtgcaactgcctgtgcggttgcggtgcgtggtttgcgtttgcttggcgcgcgtaacgtgatgcatgcggtccccaatcgtatggtgcatggttacggtttgtcgtcggcattggttgaggagttggcaccgttgcagccagcgttgcttgtcacggtggatcacggcattgcttgtcatgccggcgttgctgctgctaaggctcgcggttggcaggtgttggtgactgatcaccatttgccgggtgaaatcttgccgccagccgatgtcattgttaatccgaatttgcctggcgatttgtttccgagtaaaacgctggcgggtgtcggggtgatcttttatgtactgctcgcgctgcgtgcgcgtctttatcctgttgctcatgcggagtacgaaggtcaagaaacgcttattcaccgttctatttctcagaaaaaccgtcctgatttgacgtctttactggatttagttgcggtcgggacggttgccgacttggtgcctttagatacgaataatcgtgctttggttgctgcgggcttgcgccggttgcgtcgtggtcaagggtgtctcggactacgcgcgttgatcgaggtcagtggccgtgatgagtcgcaattgaccgctactgatattggttttgcattgagtccgcgtctgaacgctgcaggacggctggaggatatggcgttgggcattgaactgttgctcactgaggattggacgcgcgcgcgtgctatcgcagccatgcttgaggagatgaatgccgcacgccgtgtggtacagcagggtatgagtgacgatgctgagcaggcagtagcgcaagcgatggcgcagtcaggcggtgtgttgccaatggcggtgtgcctattcgatccggactggcatccaggggtgattggtttggtcgcctccaagatgaaggacaaaatgcaccgtccggtggtggctttagccccggctgagccgggaggtacagtgttgcgagggtcggcacggtcgatcccagggctgcatatccgtgatgtattggcggcgcttgacagtggttatcccgggatgattcagaaatttggaggtcatgcgatggcggccggcttgacactggatgcggaggtgttgccggtgttcgaacgtgtatttcgtgctcaagttgagatgatggttgataagaatgtgttgcaggctgagttgtatagcgatggtgaattggcggccgatgagctggacgcattacatgcgcgggcattgcggctgggtgggccatggggacaggggtttccagagccattgtttgatggagagtttgaagtgctgcaatggcgtgtcctcaaggagcgtcatttgaaaatggaggtgcgtcattcaggacggcatgatgccctgaacgcgatttatttcaacggctggcagggtgatcctccagcacggcgattgcgtttggcatatcggttggtttgcgacgattaccgcggtggtgatgcgattcagttgatcgtggaatatgcggaagtgattgaatgtgatgtatcgggtttccaagcaatttccagtggcgtacttgatccttaggttggtgcagacggtgcgttgcgatgagcacgttcaaacttgttgagggtgggaagctgcttgaagagatgtagtcgtggtggcactcacgatacaccacacattgcaatggcattgcgctacatcgttgctgaggatcgctgagtcactttaacctgggtttgccgttgtcccttacttctgtgagggatgcgcatttttagacgttatctcacatcgtacgtgcttcagaatgctttatttggctttctaccgatcccttgttgggatgtttcaggtcttgctttatctgtttcaatggcttgctaacagcagcatctgccttgtgtagacagcttataacgcgtcctggggatgggcaggtttggggagcgaatcttagtctccgatctcagtcttggggttgggcgtgttgtgtggtaggccgtacatgtgtgaaacagcgtgatgctctactgctcatccgtgcgttcgctggcatagggacaggggtgacggtttggaattgttgtcacgctgctgctcctttgggcacgttgcaagaggtggttggtgacgacataaagtcgcttagatagaaagccgcgtagagagacgaaccgttttacgttggtttggcttggtaaactgatgcgcttgttttccggaatcctgagatgatcgaaattaatccgatacgccagcgaatcgccgatctgaatgatcggatgatttcgctgagggggtatctttgactatgacgccaagaaggagcgtctggaagaagtgacccgtgagctggaaagccccacgatctggaacactccagactatgcgcagcaactgggccgggaacgctcgctactggataaaaccgtcaccggcattgctcatgtgctgaacggggtcgctgaagccagcgaatttttggatctggctgaaatagagcaagatcaggagatgttgcaggctgtcctgaacgacgtggacatctatcaacttcaggtcgagaaactggagtttcagcgcatgttttccgggaagatggacggtgccaatgcgtttgttgacatccaggccggtgctggagggaccgaggcccaagattgggcagagatgctgctgcgtatgtatttgcgttgggccgaggggcgtggttggaaggccgaattgctggaagtttctggcggtgaagtggccggcatcaaatcagccacgtttcgcgtggagggcgattttgcctacggttggttgaagacggagactggggtgcatcgtttggtgcgtaagtcgccatttgattcggataaccgtcgccatacgagctttacctctgtttttgtttccccggaggtcgatgacaacatcgacattgagattaacccggccgacttgaagaccgatgtataccgctcctctggggctggtggtcagcacgtgaacaagacggagtctgcagtacgtatcacccacgtaccgagtgggattgtggtggcctgccagacggaacgtagtcagcatgctaaccgtgatcgtgcgatgaagatgctggcggccaagttgtacgagtcggagatccagaagcggaatgctgagaaagacgtactggaggcctctaagtccgatatcggctgggggagtcagattcgcaattacgtattggatcagagtcggattaaagatctgcgtactggtgttgagcgcagcgatactcagaaagtacttgacggcgatttggatgagtttatcgaagcgagtttgagggctggtttggaagcaggcgctaaacgcgccgatgcatgattcaccgatagtttcgggtgccgctaccctacggtatcgttttttgaagtgtatacggcatccaggtatgacgacgttgctttgactgcgttatccgattttaaaaggcacccgagtttctttggtgtcacccttattcccgaatctggaacgtcctgtgtcctttaacgatagatcatcttcatgactgagcatctccctacgtcgcaggtgtcctttgacgagaacgcgctgattgccgagcgccgtgcaaaacttttagcactacgtgcgcaaggcgtggcttatccgaatgatgtcaaacgcgagcattatgctgctgatgtgcaggtagcatttgccaacgtcgagacatggactgctgaggccctggaagcgtccggcgatcgcgtccgtatggctggtcgactgatggctaagcgtctcatgggcaaggccagctttgctcagattcaggacgagtctggccgcatccagctgttaatacagagtaacgtgcttggcgaggacagctatgccgcattcaaggtgttggatgttggcgacatcattgctgttgaaggaggattgacccgcaccagaacgggcgagctgtcggtcaaggtgaatgtcttgcgacttttgaccaaggcgttacgtccattgcctgacaagtggcacgggctaactgatgtggagcagcgctaccgccagcgctatgttgatcttattgtgactccagaatcgcgtgagattttcatcaaacgctccaagatcattcgtgcgctgcgtacttggctggatgcgcgtcttttcttggaagtagagacgccgatgatgcattacatcccaggaggtgctgcggctaagccgtttgtgacctaccacaatgccttggatttagagttatatctgcgcgtggccccagagttgtatctcaagcgtttggtcgtaggtgggctggaacgggtttacgagattaaccgcaacttccgtaacgagggggtgtcgacccggcacaaccccgaatttacgatgcttgagttatacgaggcctattccacctaccatgaggtcatggatctggctgagacgatgatccgtgatactgcacagtctgtgctgggcacgacccaggtgatttgggacggtgctcagattgatctgggtccgatattccggcgttggcgcatggatgaggcagtttgccatcataatcctgagatcagcgttgccgaatgtaccgatcgtgatgcattgctccttcactgtgagcgactcaagatcaaggttaaatcgtcctacggttggggtcgattgctgttgagtatttttgaggcgactgtcgagcatacgttgatccagccgaccttcattacggatcatccggttgaaatctctcctttagcgcgcgaaagcgacatcgaaccagggtataccgatcgcttcgaactgttcatcaatgggaaggaaatcgctaacggtttctcggaattgaacgatccggaggagcaggcgatgcgcttccagaagcaagttgaagccaaagaagggggggatgatgaggccatgtactacgatgccgactatattcgcgctttggagtatgggatggcgccaaccggagggttagggattggtgttgatcgactggtgatgctgctgaccggtagcacctcgatccgcgatgtgctgttattcccttatatgcgtccagaacgttaattgatattcaatcaaaatgtgacgggaagtccttatcgtgagtcggattcaacctatgctacctgcgcgttcccacttttatagtgggacgggtgacgtgcgaaagtggatggcatacttccttgaagggggtgcgtatgcatgatgtttttgctatgcagtcccgtgaatcgtcttcgctacagcatctggatagctatgacgcggcgcatgtggaattgaacattgtgattgttgacgatcagatgtcggctaggacgatgctccgccatgtgattgaggacattgcgcctcatttgcaagtttttgacttcggtgatccatcagaagctctggcttggtgtgaggttagccaagttgacttattgttgcttgattaccggatgccggatatggatggtctggaattcgcgcggcgcctccatcgactgcccaaccgccgcgatattccgattctattgattaccatcgtcggtgatgagcctatccgtcaggctgcgttggatgccggtgtcattgattttctgattaaaccgatccgtcctcgtgaactacgtgctcgttgcaataacttattgcagctccgccagcatagtgaaagggcgaaacaacgcgtgctgtccttggagcagcgtttgtgtgctgtgatgactgaggtcgaagaacgggagcgcgaaaccgtctcccgtttagctcgggcggttgagtaccgccatatcagcagcagtacctatctcgagcgcatgtcgcaggtggccggattaattgctgagcaacttggtctgtctgaggaagaggtgcgacttatccagagtgccacaccgctgcatgatattggcaagattgccattcccgatgcggtattgcttaagcggagcacgttgaacgaggaggagatggccatgatgcgtcggcatccgcgcattggttgcgagttgctgagtggcagccagaaccgctgtatccaggtgggtgcattgattgcgttgcgccatcatgagcgttacgacggcagtggctatccggatggtttggcgggtgaggccattcctttggaggcgcgtattgttgccgtggctgatgtatttgacgcattgatctcattacgcccttacaggcaagcgtggaccattgatgcggctatttcctatttgtacgcacaacgcggacgtttgttcgatccacattgtgtcgacgctctcatcagggggcgcgatcaactacaacgcatctgcgttaagttctccactgctttggccaggccgggagtttgggatgctcaagaaagctaaatggctatgcagtcggctatcgcagcggccggatagtgagcatgtccaaaacctgatcagacttgtgatcgtctcgcttttcatcatttacctaaacgcatgttgggatggtgagactgacctcaatacatcacggatcatctggtcggtgctgctctccgatcttggtgtgtcgctggcgctgatgcttgcgattgtcatgcatccgcagatctcgcacgtgcggcgttgtattggcatcattgccgactacacatcactgacggtgctgatgttgctgatgggcgaggcgggttcgccgctgtatgtcctatgtttgtgggtaaccatcggtaatggcttacgttatggctgtgcgtatttgctggtcactacgacccttagtgcgttgagtttcctgatggtgatcctcgtttcagcgtactggaagtcgaatccgtttctggcttggggattactgattggtctgattgccatcccttggtattttcagtcgctgctgaaggcattgatccaagcccttaaggatgcacgtcatgctaacgaggctaagagtcgcttcctggccaatatgagccatgaatttcgcacgccgctgaatggtttgtcgggtatcacggaggtgctggccacaacgcgtttggatgccgagcaaagggaatgcttgaaagcgatccaggcatcggtacacagtgtgttgtccttgattgaggaagtactcgacatctcaagaattgaggcaggtaagatccgtatcctccacgatactttctccttgcaggaggtgattggcagtgttggtctgatcctgcaaccacagatccgcaataaagtgttggaatatcgtgtcgatgtggggttggatgttcccgaatggttgttcggcgatgctggttatgtccgtcaggtgttattgaacattgtcggtaatgccgtcaagtttaccgagcgtggtgggattacattatgtgtcagcgtgttgaaccgttctagagagcgcagtgtggtgttgcgttttgaagttgcagatactggcattggcgtgccattgggaatgcgggctcggctgttcgacatgttcgagcaggctgatgttggtttggatcgtcgttatcaaggaagcggactgggtaccgcgattgctaagggtttgattgaattgatgggtggaagcatcgggttcgaggagaacgtcccttgtgggagcttgttttggttcgaattgccgtttgaacttggaaaggaaccggtggtcgcgcaagagctacccgaagcatcgcagtgtacggaagcgagtaatgtcattgcgttttccaatccattcctacggcatcgtgcccgtgtcaagagcctgcgcgtgctggtcgctgatgaccatgaaactaaccgcatggtgttatccagaatccttgataaggcgggacacaagctgttatgcgtggacggtgcggaagcagtgttggattgtttgatcagtatggaattcgatgttgtgatcatcgatctgcacatgcctggaatgagcggtttggagatgctcaaacagttgcgggtcatgcaaagtgctggtctgccttatacaccggtgctggtgctgagtgccgatgcggcgtccgattcgatccgctgttgtaaagaggcaggggcgcgtgccttcctgtccaaacccgtgcttgctaccaagctgctggatgtacttgccgaaattgctgaaggggatggtggtgcattaccttacgctgcattatcgcaatcctcagttcagcagcatcaggtgttcgatccgacgggtttggatgatctggctgagttggatatggacgatggtttcgaagagcggttcatagtgcagtctttgcgagatgccgaacactgccagcagacaatgttgtctgccgctgaaactaaccagtggcaggaggtgcgggaacaagcgcatgcactgcgtggtgtgctcggtcatcttggtttaatgcgcgcttcgtcgctggcggcagagttgatgcgtatcccagattggcagttgcaatcggagtggtgtgctcgtgtccaagtgctgtatgaagaactccggtctggtcgtgatgcgcttgaagcgcgccggcaggagcgccggcgcagtggcattttacaatgatcatcagcacagctttgagtgctcagttttttagtgctgtgtttttgtgggtctgctgggcgcggatcaggcgctccatagttcggagtgatttgctgccgagttgcaatgcgctgtctacccacagctcggtgatgcgtatcatttcgtctaatgagacttcatccgcgattctttttacctgctgcatggctgcccaggtatattgagtgcgtctgctgtcacggatgatttgctcgactgcttctatccctttgccgcgcggtacgactttgtcgatcagtccaatcgccaataattcttcggaactgtagagattgccttcaagcatgaggcgttctgccagtttgggagagatgcgttgacgcatgaaagaataggctcccatgcctgggaaaagatcgaacaacacttcaggaaaacccatcatcaccccttcctcagctacgatcgtatggcagcagagcgcagcttcgaagcctcctccaagcgcgttgccttgaaccagcgcgatgctatgcacattagcattgagtccagtatggaacgcataggctccacgcacgcagcggcaggcatagtccaataatgcttcgcggtccttacagcgtatcaggtcacaaaagagctgcagatccccgcctaaattaaataccttgttgtccgaggcaagcacaataaatggtaatggaggcgcttgtttgtttaatcgctgtctaagtgcagattgataattcatgatgtcatcaatcagttttaaagaaaaataagcgcctcccatggttttagcgagatgcgtatgcatataaatccagtacacatcgcgatgggtttcttcgatgatgcgaatggaggattcgcatatgggatgaggaatgggatgtacagcggacatttattgttctccgtaatggtagtccggtcggccatgttgcggacgtggaagcgggaagtgacggtgttggccgacacttgattctatgtgcgcaaaaaatactatttactgcttcgctctctccgttgggctggttttatcgttttatttgctagatctcagtacgaataaatcagtgacagaaatagaacggtcatcaatcgttagattggcagtagaattcccagccatgccacgtaccgtaagtggatttactccctgagtggaaacagtaacgctaatgtccgcttcccctacagccgagcgctggatcgttctaaaatttggtggtacgtccgtatcgcgtcgtcatcgctgggacaccattgcgatggtggtgagaaaacgccttgaagagcatggaacacgtgtgctgatcgtggtttcggcgctgtctggtgtgacgaatgaactgacggcgattgctcaaggtgtcgttgacagtgcccagcgcgtcgctgccttggagcagcgtcatcgcgattttttggctgagcttgggttagatgcgcaagcagtgctcggcacgcgtttcaccgtgttgtgggatcttctgcaagatgcgcgtgcggtgacgcggtcactggactggcaggctgagttgttagggcaaggtgaactgttgtcttccacactcggtgcggcctacttgggtgcttcgggtgttgacatcggttggatggatgcgcgtgactggctgaccgctttaccaccacagcccaaccagagtgaatggtcgcaacgtctttctgtctcctgtcaatggaagtctgatgtggagtggcgtacacgtttcgatgcccaacgtgctcaggtattgatcactcaagggtttatctcacgtcatcaagatggtggtaccgccatcctgggacgtggtggttcggacacgtcagcagcgtattttggtgcgctacttggtgcggcgtgtgttgagatctggactgatgtaccagggatgttcagtgcgaacccgaaggaggtccctgatgcgcgtttgctgacgcgcctggattactacgaggcacaggagatcgccacaactggcgcgaaggtgttgcatccgcgttcgatcaaaccatgccgtgatactggcgtgccgatgctgattctggatactgagcggcccgatgtattggggacccgtattgatgctgaagttgagccggtgcttggggtcaaggcgattagccgtcgtgatggcatcgtattagtgtcgatggaagggatcggcatgtggcagcaggtgggttttcttgctgacgtatttacattgttcaagaaacacggattgtcggtggacctcatcggatcggcagaaaccaatgtcaccgtgtccttggacccctccgagaacctggttaacaccgacgtactgactgcattgtcaaccgatttatcacaggtctgcaaagtcaaaattattgtgccttgcgctgcgatcactttggtcgggcgtggcatgcgttccctgctgcataaactctctgaggtatgggctacgttcggtaaagaacgtgtccacatgatctcgcagtcttccaatgatcttaatctcacctttgtgattgatgagacggatgcggacggattattggcggtgctgcatttcaaattgatcgaaagcggcgcaatgcctgtccaagagcgtgccgtgtttggttcgccttggcgcgagatcatcggacacgtacgtacgcgggtcatgccttggtggcacagtgcccgcatgcgtttactggccatgagagatgaagagggcattggtccttgctacgtctaccatttgccgacagtgcgcgaacgtgcgcggcaattgaatgcagtggctgccgtggatcagcgctactacgccatcaaggccaacccgcatccggccattctccgtaccctgattgaagaaggctttggactggagtgcgtgtcgttgggtgaattgcgtcacgtgtttgcagtagtgccacacctggttccgtcgcgtgtgttattcactccaagtttcgcctcacgtgtggagtacgagcaggcattcttactaggtgtcaatgtgaccttagacaatgtcgaggccttgcgcttatggccggaggtattccgtgaccggacgttatggttacgtatcgatctgggttacggcgatggacatcacgagaaggtcaccaccggtggtaagacatctaaatttggcctttcggtcacgcggattgatgaatttatcgatgttgccaagacactgaacataatcgtgaccggcctgcatgcccatcttgggagtggcgtggagagaggcgaccattggtcccgcatgtacgatgaactggctggttttgcctcccgcatcgggagtgtgtctaccctggatatcggcggcggtttaccgatcccgtaccggcctgatgatgaaccatttgacgtggaggcatggggagtcagtttggctgaagtcaaagccttgcatcccaaattgcaattggtgatcgagccgggccgcttcctggtggccgaggcgggggtactcctgacccgggtcacccaggtgattgagaaagatggtatccgtcgggttggcctggaggctggaatgcataccctgattcgcccagccctttacgatgcctggcacgacgtggagaacctcagccgcttagatgagataccacatgtactgtgcgatgtcgtgggtcctatttgcgagtcatccgatgtgtttggccgttgccgtcaccttccagccgccaccgcctccggtgatttgatgctgattgcagatgctggcgcctatggtttctcgatggccagcacctacaatctgcgcggcctgccggccgaggtcgtgcttgatgcttgagtggtgttgtggtccggttgtaacgacaatgatgcaggttgtgcatcctgttgcatggagactgttgacctgtccgtttcgggggtttttatgacggccacttttgatacatccaacatctctacatttcgctttgtgcgttccacattggatgcacagaccggcgttgtttctttggtgtatgcctttgaccagggaccggaatttgtggaaaaaatcatggtcccgggcgcgccgtttgccttggaggggccgcgtgccgaggccgtacgccaggcattgcgcctgctgcacctgattgctggtgtgagttattacaaagcaatcgttccgtccacagtgacgatggatgatgattccattgatgctgagaccgctgcgcttgtggaggaggtgtacttgtatggactgagcgaattcgcatatcgcaatgggttgaacctgcatggtcgcttccaattgccggtgcaagctaccggagcaacggctcctgcaccgcagctcggtttgcgtgaacacgccttggtggcgattggtggcggtaaggattccttggtcagtattgaggcattgcgcgtcgccggtatgcagcaaacggtggtgtggatcggtgcttcgcaattgatccgtgtctgcgctgagcgctcagaacttccgatgctcaacgttggacgcaccttagcgccagaattattcgcgttaaaccgccaaggtgcctggaacggacatatcccggtgaccgccatcaactcggccatcttggtgttagttgccttgctgcatggcgtggatcaggttgtgttttccaacgagcgttccgccagctacggcagtgtcatcccgggcaccggcgaggtgaaccatcaatggtccaagagctgggcattcgagcagcatttcagtgactatgtacagcgccgtgttgctgctgatctgcgttactactccttattgcgtcccctttcggaattggcagtggcacgacagtttgcacactgtgcccgctacgacgcgtatttctcgagttgcaatcgcaattttcacctcttgggcgaacgccccgcgcatcgttggtgcgggcagtgtcccaaatgccattttgtcttcttggcgctggcaccgttcatgcccaagacccgcctcgttgggatctttggccgtaacttgttggatgatgctagccaagccagcggttttgatgccttgctggaatggcaggattacaagcctttcgagtgtgtcggcgaagcacgcgagtcccgtaccgcgctggccgtgctggcgacacgtgcggaatggaaggaagatgctttggtgatgcgcttcatgcgtgaaatccagccgcatctggatcctgcacagttacagttagaccctttgttgacgttgtccgatgagcatcgcatcccagcatccctatgggagtccatgagtgcgcatttccgcacttgaaggctgccgtgttgcgttgtggggctgggggcgcgagagccgtgccgcttaccgcacattccgtgccgcgtttccgaaacaaccattaacgttgttctgcacgatcgccgaagcgacggaggtgcaggcgctggctgatccggtactgtccattgaaactgaagtgagtgttccacggcttgccgccttcgatgtggtgattaaatcgcccggcatcagtccttattctccgctggctgttgctgctaccgccgcgggcgcgcatttcattggtggcacccaattgtggtttgcagcgcacgcagatacggatggcgtggtgcctggtgccgtgtgtgtcactgggaccaagggcaagagcacgacaacagcactgctggcgcacctgttgcgtgctgcgggacattgcacggcattggccggcaacattggcatgccgttactggagttgctgacgccgcagccgacacccgagtattgggccatcgaattgtccagttatcagaccggagacgtggcacgcagtggggcgcgtcccgtactggcgttggtgttgaatgtgtttcccgagcacttggattggcatggcagcgagcagcgttatatcaacgacaagctcagcctagtcactgtgacgcgtccccgcatcgccttgctcaatgccgccgatccgcggttggcgtcgctggcattgccacagagtgatctgcgttggttcaaccggcgcgatggctggcacgtgcgcggtcaggtggtgtatcgcggtgaccgggctgtgctggataccgcattaattccgttgcctggggcgcacaatggcagcaatgtctgtgcagtgttggccacactcgaagcgctggggctgaatgcggtggccttggcacctgccgcctgcaatttccatccgctacccaatcggctgcaatttttgggggagcgcgatggcattctctgggtcaatgattcgatcagcacgacgccgcatgccaccttggcggcgctggattgtttcctcgggcgttgccgcgtcgccgtattggtgggtgggtatgatcgaggagtggattgggaatgctttgctgcccggataacacggaaagtacccctggacattgtcacgatgggagccaacgggccacatatccaggcgctgctggcgccattggcagcaggccgatttggattacatgcggcggtggatctcccgcaggcggtggcgttggcacgcacggcgttgggtgcgcaggggggggtgttattactttctcctggagcaccgagttttggtgcttatcaggactacgtggcacgaggtcgccactttgccattttggcggggttcgatccggaggtgatcagcagcatttctggtcttggtattgcttgagctgaggtcagatggattgaaacgatgatgcccccgccaagccaagtgttgcagcattgcttgttcacatgatccacacgcattccatgcagtcttgctgggagctggccatgacatgctgtgcactcatgttcttacatcgtttcagatgcctgtgatgagcagcatggtatgggaggtttcaggtacagctgtcaatagaaaaacgcccgaaacctttgcggctgggcgtttggggtgaatcgggtgaaccatgtggtctaccggattctgatgatggtgcccaagagaggactcgaacctccacggttttacccgctagtacctgaaactagtgcgtctaccaattccgccacctgggcttttcagggggttggattatgaaaagccccctaagccctgtcaagcgagcggccgtgctgagtccggtctgtgcaatgcggtgttgatgtggtgagtcgcgggggatgtttgatgaggtggcgtgcggtggcgatgtatcatgccctgctgttgctttgagtccccacatacctatgccatggatgcgtgtagaagcgattgggttgctattgatctataacaggattcttacgttgagatcggttcgatctcctgttgtgccagagcatgtttgcacattatttacacattctctaaatgtgtaggtatgtgagcatgggcaattgatatgtgctgactgtttcgtgtttattggtcctgtttccagtgttgtcagctttgcaacataccgatgatgtgtcgatctagatgacgatccgatccagctccaggtggcctttgttcttatggaggatgtcgcttgattcgtatgatgactcgcacctgcggtatccatgtcatgagtgtattgcgtggtgaccgcgttcttggtcaatgaatggggagatggatgtcctgggataccctgcgatgtgtgaatcaagtcgtatgtatgagtcattctgttgcatgggatgacgagatatcggcaagcttccggatatgactgattctttgcgatctattcatgttgtggccgctgtgattgctgatgtgcgaggacgcttgctgctgagtaggcgtaccgagaaccgcgatatgcctggcttgtgggaatttccagggggaaagcgtgagtttggtgagacatccgagcaggcgttggcccgcgagttgtatgaggaacttgggatcagcgctgacgttggcgagtggttgatggaggtgccgcagttgtatccgggcaaacgtctgcgtctggaggtgaggcgagtgcgtgcttggaagggggggctgcggggacgtgagggacaggcgttgacgtgggtcgaacccgataaattgttgcgttattcgatgccgccggctgatcagccggtcgtggggatgttgcgtcaaccagcccgttatttggtgacacctgagccggggaagcaggacgctgagtggttggatgcagtggagcgtgcgtatcggcttggcattgagcggatccagctgcgcatgcgtcaacacgatccggcgcgttggtcggggttggtgcgcgaagcagtgcaacgtcgtggccgtgcccatgtggaagtgttgctgaatcgcgatattgctttggccgaggccgtgggtatcggggtgcatttgggggctgaacagttggctgtgttggatgcgcgtccgttgccggttgggttgccggtcggtgcgtcgtgtcattgtctggccgatttgcgccatgcgcagcgcattgggtgtgattttgcggtgctcggcccggtgttaccgacggagagtcatcctggtgcagtgacattggggtgggaggggtttgagcagttgcgcgagcaggttgcattgccaatctatgcgatcggtgggatgggcgctgatcaggtcaaggaagcacgacgtcatggtgcgcaagggattgctgccatgcgtggtttgtggccggggggagcgaagcaataaaagcaataaggcgtggccactgttgctgtatgtggtgcagtggtgggcgcgctgtgggggcttcaatagcctaagcgttgcagcacttgggtgcttggtttggctaggttgagcgtgtagaagtgcagccccggtgcgccgccagcgattagccgctcacataatgcggttacgacgtcggcaccgaacgcgcgtatcgatttggtgtcgtcgccgtaagcctgcattttttttgtaatccagcggggtatttcggcgccgcattgttcggagaaatggtgcaacttgtcaaagttggagatgggcatgactccggcaacaatggggatggtgacgcccaggcgctgcactgcgtcgacgaagtggaaataggcgtctgggttataaaagtattgagtgattgccgcatcggcgcctgcatcggctttggctttgaaatagtgaaggtcgttcagtgtgttgctggcttgtgggtgggtttccgggtatgcgccgatctctaggtggaagtgatcgccatgctcggcacggatgaaggtaatcaggtccgctgcgtagcggaggtcgccggggtggcccatgcccgaggggagatcgccgcgtagcgcgacgatgcgttggcagccaatcgcgcggtacagtttgagaagttcgcggatttcttggcgactgccgccgacacatgacagatgcggtgcggcgtcaaagccgtggtgttggctgagatggcgcactgtttctgaggtgtaactgagtgtggagccaccggcgccgaaggtgcaggagacgtattctggtgtgaatgtgcgtagccggtttgctgtcctgtccaactgtgcgcgttgatcgtcgtttttgggtggataaaactcgaagctgattggaatcatggcaacgtgatcggtggggctgagttattatatctcttcatccggatgaatgtgaaatagggtgtctgggttgctgctagaggcaggggtcgtgccggtgaagggaatgcaggacaggatgattaaggcggatagggttaatttgattgcgcatccgtaaaaacagtagatcaagaaatactgcagaagctgccaaatgggcagtcaagtcatgatgtccatcattgcactgtttttggggatcacatcttaaataagagtgcctcaaaatacggaagttcttggggtgccagattcaaatatggccgaagcaggtattggttactgcggatgtgttgttttcttttataaatgaaagtggttatttttcagaacaaggcaccgccaagcatattttgttttctaatgtagagacatgctgacagtgcttgtacgaatcactcttgagtttgttgcaatcttgatgtggaatcccaagatgttttgttttctatttccctaattcaaatttgatattgagtgaaacgccgatgctgttttcaccaagggagattggtgtttctgtattgtctttcattgcgcgggtgaacatcactttcattggccgtgagtcgccgccgcggctctcggagatatcaattactcggcgtaccttaaggcccagacggtcagcataggacttggcttgtgcttgggctttttgtaatgcggagaggcgcgcttcgtcgtaggccgattcaatctggtcgatctcaaagcttgggccattgagttggctgacgccgttggttgtcaaaatgtcgataattttaccgagcttggtaaggtcacgtaccttgatgttgatggtattgctggcttggtaaccggtgagtttttggccaagcttttcttgatagacgtattgcgggtaaagcgaaatgctgctggtttgcacatctttattggggatgcctgcagccttgatgccggccatcacccggctcattcgctcggcgttttggctcattgcggtgttgctgctggggtccttggtgaacacgcttgccgataggttggcggtgtccggggtgcgcttgctctctccttctgtggaaatgctgagtaaggttgcatcgttgggcagattgcagctggaagagtcgtgagcatgggcccttgtggccaatcccgtgaacagggacagggcaatcagtagtggtggtaatgcaatacgcatcaatttttccttggttggtgaatacattgtgagtcagtgagatgtgtcgctaatgaataaattgtgatctgagaagggtaacgtaagtttggtatgcgcgcgggttattcttccacgtatgctctatctcgcctcccgttcgctgtgccgtcggcaattattgcaacgcttggatattccattccaagtcattgatctagagattcctgaggtgcgtagggaggacgaacttccccaggattatgtgcgccgtgtggcgcaagagaaggcacaggtggggttggcaagggtgagggatgcgtttgcaccgaaggtgttgggtgcggataccgaggtggtgttggatggccgcgtcttcggtaagccggccgatttggttgaagcggcagcgatgttggccgctttatctgggcgtactcatcaggtgatgacggcggtatcgttggtggcggctggaggtgtggcagcgcaggtattggtggtttcggaggtgagttttgcgttgttgagtcagggacagatcgcgcgttacgtggacagtggtgagccgatggggaaggctggtgcatatgccatccaaggacgaggggagtgtttcgtcagccgtttggtcggtagttattctggggtgatggggttaccgctacagcaaaccgctcagttgctgactacgttcgaggagagttagatgtcagaggagatcttagttaacgtgacttttggtgaaacgcgtgtggcagtcgttgaaaacggtctgcttcaggagttgcacattgagcgcgatgggtgccgtggtgtggttgggaatatctataaaggcagggtgcagcgcgtcatgcctgggatgcaggcggcttttgttgatgtgggaatggaacgtaccgcgtttctacacgttaacgatgtggtgcggtctgcgcctgctgattccagtgtgattgatactgatgaaacgacagtgccgcctttatctgagataccgattgttgagttactgcgtgatgggcaggagttgatggttcaggtgcttaaggagccgatcggtacgaaaggtgcgcgtttgaccactcagatcagcattccttcgcgttatttagtgttgctgccgcagtctaagatggttggggtttcgctccggattgaggatgaagcagagcgtgcacggttgaaagcagtcgtgacggatctggcggcgcagtacggtgattacggttatatcgtccgtaccaatgctgagggccagtctgctgatgtgcttgttgaggatattgcctatttgtcgcggttgtggggtgtggtggagcggcgtgggcgtgaattgcctgtgtgcagtctcctctatgaggatttgagtctttcgttgcgttcggtgcgtgatctaatccgtaaagatgtggaaaagatcaaggtggactcgaaggaggctttcgcccagttgcagggatttgtgacgaaatatatgccggtgctggcggataagttggagttgtatgtcggcgatcatccgattttcgatctttatggtgtggaggatgagatcggtcgcgctttggatagacaaatccctcttaaatcaggggggtatcttgtcattgagcaaactgaggcgatgaccacggtggatgtgaataccggttcctttgtcggtaagcgtactctggaggagacggtgtttcgtactaatctggaggcggcgcaggcgttggcacgtcaactgcggttgcgtaatcttggcgggattatcgtcattgattttatcgacatgcaagacgccgaacaccgttgccaagtgttgcgtgtgttggagaaagcattgatacgtgaccatgccaagaccacgctgtacgatttttcaccgctgggtttggttgagatgacgcgcaagcgtactgtggaaagtttgcagaggcagttgtctgagacgtgccaggaatgtggggggcgtggcacgatcaaaacggccgagacggtaacctacgagatattccgtgatatcacccgtgcagtgcgtcagttcgatgcggtgcggttgttggtgattgcctcacccaatgtggtgtccaggatgacggatgaggactctgctgcggttgctgagttggaggcggtgcttggcaaagcgattcggtttcaggctgatccacactatttacaggagcagtatgaggtggtgttgttgtgaatgatttggtgccatgtgtggtgtacatggtggatatgtggttgtggatgttcattatgcgtgtgtcaaggtgggcatttgcttcaaggcagatggacatgatggggttccatgcggccgattttttcaagcttgctattgtttaaggtgtcttctttgttgcgctttccccgtgtttttcgttatgtggcgtacgtttgcgttggtgtttttgttgcagtggcattggcgatggggatactgagccagctcttgccagtggtcgaacgtcatccgcagcaagtggcggactggctcagtgtacgtacgggtcagccggtgcgcttcgataccttgaatacgtcttggacgcagcgcggtcctttgctgcgtttgcagggcgtgcgtatcgggccgcaggggaggatggcaattggagaagtagaggtgctggtggcgatgtataccgggcttcttccagggcattcgctaatcgagttgcggttgcgtgggatggcgctgactgtacatcgtgacagtgcgggacgttggtcggtctatgggttgccccgtgatgtcgggggcgatccgttggaggtattgcggcggcttggtgagttacaggtgattggtggtcggctcagtgtggatgctccgtcgtcaggggtgagtacgacgttgtcgcagatcaatctgcgggtgcgtgtggccggagatcggctacgcgctggtgttcatggttggttggattcagcgcgtgctccggtgacaggggttgtcgattttgatcgtgtgagtggtgatggtgatgtttatgttgagacgctgccgaatcagttggcgtcttggtcatctttgcttgctggtgtgatgagaggagtccacctacgtgatggtgctggccatgtgcgggcttgggcgcaacttcatcgccaccatgtcgagcaggtgacggtgcaaggggatctacaaggggtccgattcgagggggtgcgtcttgctggacagacagtggtaccaagggtgttttggccgcagttacaggcgctggtgcgttggcaacgtcagggggatgggtggcgggttgtggcgcctcggttgcggatgggggaatcggggaggctgcaaaagttggatgggttggtggtcgaggggggttcgttctatacggtcagtgcaccagaggctgtagatgccggagcggtgatggcggtgttggcgcttggcgattggcttgcgccggatctgcgtacttggttgctgcgtgcacgaccacagttgcgggttgctgggttgcatgtgcagagccaggccgatggtcggctttgggttgctggccgtgttgagcagcttggttttctacctgtggttgatgctcctggtctgagtggggtccgcggtacgttggagggggatgcgcagggggcggtgctgactctggattctgctgcgtcggtccattttgattggccttccgggtttggacgtaggcatgaaatccacttggcggggcgtattgtcggttggcgtcaaggtgatggttggaaagttgcaacgccagcattgcgggtgcaggcaggcgattacggggcaagtctgcgtggtgggttgtggttcgaagggcatggcatgttgccgcgtatttcactggctgtgcagttggatgatgtcgcggtgccggtggccaagcgcttttgggttcgttctaagatgagccgtgagttgattgattggctgaatgctgctttggtcaatggttcgaccagtggtggctttgctctgattgagggggagttgaaggattggccgtttaataaccatgacggttattttgaggcggctggtcgtatccatggtggggtgatgcgatttcagtccgagtggcctgtattggaaaagctggatgctgatatcgcttttatcggtaatggtttttcgatcaagggacggggggagcttgctggcgtgccacaagttcagttggaggcgggtatagaggattttgagaagggcgatctctatgtgcgtgctcatgtccaaagtgatgcgactcggttgttggggctgttgcggcgcagtccattgcatcaacacgacgcggatactttggacagtgtcagtgcgagtggtccggcgagtgtcagttttgatatgcagctgcctttgcgtcatgagcagggcgcggactacggtcattttgggggggaggtgtcgctggagaatgtgaattttattcaccggcgttggaatctcgcttttgagaatgtgcgtggtcctgtgcgctacagcagcgatggtttcagtgctgagggcttgcatgtgctgcatcaggggttggaggggcgtttaagtgtgcgggtgggtgatgcggtcgatgatccagcacagatattccaggcgcggttgttggcatcggtcaatgtcaagtctttgctgcgtcacgcgccgcagatggattggttgcggccttatgtcaatggcatttcgcagtggcggatcggtattgatctggccaagggtgcccctgacgcacacagggtctttggtcatttaacgttggattcggatctggtcggtacggcgttgaatttgccggtgccgttggacaaagggagcggtagggtgttgcctgctcatatcgatgttgctttacccatggagcagggtgatatcgctttggcattgggtaagttggttgcggcgcgtgtgcgtcatcgagaaggggaagggatcggtgtgcgtgtggttatggggagtgacaacgtgcgcgacgcaccgttggagcatggtttggttgtcattggacacagtacgtcgctggatgcaatcgactggatgcggttagtgcgtggtgggtctgctgtttcctcagatttgccgttgcggttgattgatctgcaggtggatagtttgttgctattgggtgggatgttcccgaatactcgatttcagttgcgtccggtgcatcagggggtcgcggtggcggtggatgggccggcattgtctggtcaattgaacgttcctgagtcaattgacggtacggtcacgggtagtttgggtgtgttgcactggcaggcagcgcaggctccgtcggtgaaggtgtctggatcggtgcagtctgcaatggtggatgtcgatccggcttcgattccatctttggcgtttgaggttgaagatgcgaagttcggtcaggtcaagtttggccgtatggagttgcgtactcggcatatgtctgatgggatgcaggtagatcagttgcagacaaattcgcctagtcagcggttatcgatgttcgctacgtggcggggtaaaggggaagccgccagcattcgactgtcggcgcgggtcgatagccgtgatcttggggagttggcacaagcgatcggttatggggagcaattgcgtggcggtgaggggcagattcagttgagtgctggttggaatggaccgccggtcggtttccagttggcttcgctgagtggtgatttaaaagtgactgcgcgtaatggccagttactggaactcaagcctggggctggtcgggtgcttggattgctcagtgtgacgcagttgccacggcggttaatgttggatttccgcgatttattttctaaggggttagcgtttaatcggttctatggtgaagtgcattttggcgatggtcaggcgcgcgcagatggactcaagattgaggggccagcggtgaatattgcgatccgtggtcagtctgatttgtctacgcagacgtttgatcagatcgtggatgtgaatcccaaaagcggcaatttgttgacggtggttggtgcggtggctggaggtccggtgggtgcggcggtgggtgcggcagccaatatggtacttggtaagccattgggtgcgatcggcgccaaaacctatcatgtgagtgggccttggaatgatccaaaggtcgaggtgctgaatctggactcgcgtcagcgtgataagccgtccaatagtaagtcggagaatagggggggggctggttgatcggtgtattgcgatgatgaagtgggtatgtgtgctgcgttcgtttgatttgatcttgtcaattcagtgggaatacttgcgtgtttgttgatccgcccgcattcttggcttatgaaaaataccgcactctctgtcgccgaatcccggctgttgctgccttccggtctggatgacgaccaaatcgattctattttcggaacgttactcgggcctggggtcgattttggcgacctgtatttccagcacgcgcggcgtgagagttggagtatagaggacggtattgtcaaggatggaacgcactcgattgagcagggtgtcggggtgcgtgctatttctggtgagaagaccggttttgcttattccgatgacattaaccgggatgcgttgcttgaggcggcgtatgcggcgcgtgcgatttcgcgttcgcctggggatggggtgcaggggacacatgcggtattgctccaccaggagcgggagctgtgtttgtatccggcattggatccggtgggcgggatggataacgctgagaagattgcggtgatgcggcgtgtcgatcagttattgcgtgcggctgatccgcgtgtcactcaggtgatggttaatttgtctggtggtgtcgatgtggtgttgattgcacgcagtgatggggtgctcgctgcggatgtgcgcccgttggtgcgattgaatgtgcaggtgattgttgagggtcacggtcgtcgtgaatctggctatgccggtggtggcgggcgttatgggtatgctgagttgtttgccgatggccgcccggaggcgtttgcacgggaggcgcttcgccaagcgttggtgaatcttgaggcgattccggctccggctggtgtgatgccggtggtgcttggtgctggttggcctggtgtgttgttgcatgaggcggtgggccatggtctggagggtgatttcaaccgtaagggcaccagtgtttatgccggtcgtatcggtgagcgcgtcgcttcgccaggggtgacgattgttgacgatgggacgctggatggtcgtcgtggttcgctcaatattgatgacgaagggacgcccacgcaatgcactacattgattgaagatggtgtgttggtcggctatatgcaggacacgttgaatgctcggttgatgggagtggcatcgactggtaatggtcgccgtgagtcgtttgcgcacttgacgatgccacgcatgaccaatacgtatatgcgtgctggtgtacatagccgtgaggagatgatccgttcggtcaagaaggggctgtatgcggtcaatttcgggggtggccaggtcgacattaccagcggcaagtacgtgttttcggcgacggaagcttatttgattgaggatggccgggtgactgctccgattaagggggccacgctgattggcaatggtcctgagacgatgcagcgggtgcgcatgattggggatgatttggcgttggatgcgggggtcggggtctgtggcaaagatgggcagagtgtgcccgtcggtgtcggccaaccgtcgttactcattgatgggttgacggtgggggggactcaggcatgaatgcggttaggttaacagatggtcgaagggttttttctggttctgctgatggttgttattggaggcgcagcggaggtggctgtttcaattgatgttcgaatagaggagaaaatgcgattgacatcagagacagcgtaggccgttttgagcgaggtttttttggctctctatagctgttgtttggatgaaggcgttctttgggctggggtggcgtcgttgctcaatgacagttcttggaagtttttgcggtgccgtgtttggtgattcaggggctgctatatgctttgatgcagtgagattctttagtgaggctgcacggttttgttgttgttacgttgccgataattgaggcagcactattgtgttcaggggactttatttagtctggtatggcgggtgaatgggggtgttgtttatcacggcatggtttggtcgattattgtggtgtttagtgctgattgtcgctgttttgggtgatgatcaatccatggagtacttggtacagctcgcggaatgcctgcggtggtttgttcctggcttgttcggttttggtgttgcgcagtaattggcgcagttttccgcaatctgcttgcgggtattggtttaatagttcagtgagtgcgctgtcgccttcttcgaggaggcgtttgcgccactgttcggtccgatgcaaggttgcaacctcacgttgtgcctgtatgccgctggcatcaagtttctcgcggatcgtttctagtgtggtgtcgtcttcgcgtcgcatttgtttggcgagaaaggcaagctggcgcttgcgggcaatgtgtgatgtgatccgtttggtttcggtgatgtgtggtagtaatctctcggggattggcagtttggccaactgggcaggggtgagtgctgctagtttttcggagagtactaggacttccagtgctgtacggcgttgttggctgcggctggggccaaggaattcgccggtttctttattacatccgcgcattgcaccattcttccacatttaaaaataaactttgtcgaccgtgtacataggcacgctgacttcaacaggataagacattgaacgtatgttccacagatctcaatagtgttgatggtagccaggtgcgtttggatgttctggctgatattgcgcagcgtttgctggagcgggctcatgcatgtggtgctactcaggctgaagtgggttgcagtgaggagcgtgggttggatgtgaatgtgcgtatgggcgatgtggagacggttgagtctacgtgtgatcgcagtattggggtgactctgtattttggtcaccgcaagggctgtgccagtactgccgatttgcaagaggcaagtttggaggccactgttgcacaagcgtgtgcgattgctcgttatacggaggatgatccagcgaatgggttggctgatccagtgcgaatggcaacggtgttcccggatctggattgttggcatccgtggactctggaggccggtgctgcggtggatttggctctggcgtgtgaagcagcaggccgcgctgctgatgcgcgtattgtcaattctgatggtgcttcggtcagtactcgttttgcgttgtctgtgtatgccaattcgcatggttttgtcggtcgtgagcgtatgactcagcattcgatgagttgtgcgttgatcgctggtcatggggatggaatgcagcgtgatggttggtataccaacgctctggcacgagaggatttggagttgcctgttgcagttggacgtaaggctgcggagcgtactgttgcgcggttgcagccgcgttctttggcgacgactcagttaccagtattgttcgttccagaagttgcacgttcgttgattgggcatttgctcaatgcggtttccgggggggcattgtatcgtcgtgctagttttctgcttgatagtgttgggacccggttgttcccagagtggtttgcgattaatgagcgcccccatttgcgccgtgggcttcgctcggcgacgttcgatgctgaaggtgtggtgacttgtgatgctccgctggttgcaggcggggtattgcagcgttatgtgttgagtagttattcggcacgcaagcttggcttgcagagtactgcgaacgcaggtggtgtgcacaatcttgaggtgatagcgaatgctgctggtctggatgcgcttgttgctgggttgccgcgtggtttgctggtgactgaattaatgggcagtggtgtgaatccggtgactggtgattattcgcgtggggcggctggtttttggattgagaatggggcgattgcttatccagtggatggtctgactattgctggcaatctgcgtgagatgttttccgccattgaggcggtgggtgcggatgtggatcggcgttcgcatgtcagcatggggtcgttgttgatcgggaggatgatggtggctggtaacgattgatgcgatgttgatgtacgtcgttgatagggttatggggaattttgttattttttgttatgcgggttagtcaaacgccactatacatctcaggcttctagatatttaggtaattcagcggcaagtaggttgattgctagtctggagcgtaggggcacatgctgggcggcaggccaaactacatgacactccattactgcacttggacgatccccccaaatgccgatgagttcgccgcgttgcatccgttccataagtagccagtagggtagccaggcaactcccattccatcgacggcggtatccgcaatgacctccagatcgttgcaacgcagtcgggaggtgatcggaatgtcgacgagggcacctgttgcgtcgggaagtgtccaggccatgttacggtcattgcggcagtaggtgagcaagtcgtggtctgcgaggtctgcaagtgtgtggggtttgccccttgcggccaagtaaatcggtgaggcgcataggattttgcgttggttccctaagcggcgtgcgcgtagtgtggtgccattgcccagagggccgttgcgtaccgcaaggtcgaaaccgtcggcaatcaggtcgacatgatggtcgctgaagtttagttcgagttctagctggggatgttctcgtgcataggtgcgcaggatgggggcgacacagtgccgtccgaacagaactggcaaggaaacatgcagttgtccggccacttctcgccgaccttgctcaagcatggcttcgccagcacgtaattctttgattgcacgaaggcaccgttcgtaatactgctggccgtcttcggtgagggactgcactctcgttgtccgttgaaaaagctggacgccgaggcgcatttctagacgggcgattgctttgccgattgtggagcgggtgagtgaaagtcgtttacctgctttggcgaagccgccggcttcaacgacttcaacgaatagttgcacaccatcgaacatgttctgcatatcttcatatacttcataaaatttatataatttattattgtagaattttttgaatcattgagtggaaatgtatcctctattgttgatatgaattctgctttatagtggctggcaagttaagtggagatttggacatggctcgggaagtttgaaagtttgcagtttccccgttcaattactgtttttcagaatttaataaattaaggtgagatagatgctgatttcgatcgtgtatgacagcggttatggtcacactgcacaggttgctaaagctgttgcagcaggtgtccaggaaataaaaggtgccgatgttaggctcatggccgttgctgatggttcggtggagtgggagatactggagaagagtgatgcgatcattttcggttcgccgacctataacggtttaatcagtgcgaagttgaagcagttcttcgaggattccaccaagcaggtttgggtgccgcagaagtggcgcaacaagattgctgcgggttttaccaactcaggagcacagcatggtgacaagctcaattcgctgatgtcgatggtgttgttcgctgctcagcatggaatgatctgggtgggactcgacctgatgccgggcaacaatagcagcactgggagtcccaatgatcttaatcgtctcggaagttggttgggcgtgatgacgcaggccaataacgatgaggctccggaaatcgcaccgcctgccagtgatttgaagacggcgcagtatcttggccggcgtgtggcggagaccgtgcgccgctttcagcccgtgtaatccgttataccccggaacgagggagtttgaatatgaaattgttgtgccttgacgttccccagcctggtgcgagtttggagaaatatcagccgtacatgctggatgaagtccgtcatggttggcagatgtacaagagtggcattatccgtgatatctatttccgacaggacacgccctggtgtggtcatcattgtggaagctgagtctgtcgatgctgccaggaaggctctttcaaagtttcctctcgccgaggccggattgatcggttgggacgtgattccgttgggtcctttcgtgaactgggaagcgctttttgcttctggtaacgcttgagattcgatctcgctatttctttttccggttgcgccggtgtggtgtggctggaagctcttttaaggaaatttaaggaatacacgccatgaatgtaatgggcttcgctgctctatcggctactggcccgcttgaacggttcgctttcggacggagagctcccaggccggatgacgtcgtcatcgatatcctttactgcggtgtctgccacactgatctgcatcttgcccgtaaccacggcggctttactacttatccaatcgtgcccggtcacgagatcatcggttgtgtacgcgaaatcggcaagacagtcacccgcttcaagcgaggcgatctagttggtgttggttgcatggtcgattcttgccagcactgccagccttgtctcaaagggtgggaacaggactgcattgaaggttcgaccttcacctataacagtactgatcggcgggatggcagtatcacctatggtggctattcagatgtcattgtcgtgcgtgataagttcgtgttgtcgttgcctgatggtctcgatccagccggagccgcgccgctgctttgcgcgggcatcacgacatggtcgccgctgcgtcgctggaatgtcggcaaagacagcaaggttgcggtggtcggtcttggcggtctcggacacatggccttgaagctggctaaggctcttggagccgatgtgacgttgttcacgcgttcttccggcaaagagggagatgccttccgtcttggagccgaccgtgttgtgttgtccagcgatctggagcagatgaaagctgtctatagccgctttgacgttatcatcgataccgttccttatgatcacgacgtcaatccctatatgcccacccttgtacttgaaggtgtgctcgtactcgtcggctatatgggaccgctcagtatgcctgtgaacgctggaggtgtggtacgtggccgtagggccatttcggggtcgttcatcggcggtgtgcctgaaacccagcaaatgctcgatttctgtgggcagcacggcattgtctcggatgtcgagatcatccccatccagaaaattaacgaggcctatgagcgtatgttgaaaagtgacgttaagtatcgtttcgtcattgacatgacttcgctcacatcatcaggagcttgaaaacatgaccaataacatcaaacccatcctgtgcgtagtgaccagtcatccgatccgtggcgacagcggtgagcctacggggttcgcgatggttgaactcacccatccgcttgaggtctttgaagcagtgggtatcccggtggagatcgcttccatccgtggtggtcacccaccgatcgacttctttgatctttccgacccagtcaatgatcgtttttggaagaacaaagcgttccgtcacgcgctcgctcactcattcgttctcggcgaccttgatccgttgcgttactcggcggtcttttttgttggtggtcacggtacgatgtgggactttgctgacagtctggccgtgcagaacgtaatccgtggtatttgggaaagtggcggtattgtttccgcggtttgtcatggtcctgctgctctggtgaatgcaacactctctgacggcagttacctcgtcgctggcaagaaggttgctgcctttaccgacgaagaggagactgaggttaagtacgctaatgttgtgccttatttgttggctaccacgctgaagcagcgtggtgctctacatcagtctgctcctaattgggttgaaaatatcgtggtcgatggtcgcctcatcaccggccagaacccagcttcggcgtacggtgtcggccaacgtgtagttgaccagctcaaggccagtatttgacgtcagagttaaacgttgtcggcgtgaggacacagtttattgaggcatccactcggtctgttcttgcatgtctgcggtgtgttctctcgtggcagtttttttctcgtcagctttttaataatgtgggtgcgtcgttagtggtgcggcgcggctcaaggccaatcatggtctgagcaagctgccatgatcatatggtaatcatggggataggaacgcatttcagcttgtgaggcttcatcgttccgatgtcaattttttatctgaggatttcactcggtattgcagttaggtctggtttgaacaggatgccggacgctcgtagtttgaacgttccgtaagcttaggtggttcttggtgagtacgatctgtagccttgtgtcggaacggcgatgaaaaagatcgaaacaaagattgaggcaggctttttgacaggtttgacgaagaaatcattgcagtatctggattggtaacgcttgctaagcgcatcgttgcgcttagcaaggaagattacagtatttcagagattgctaatttgctgttatacaccgaaagcaatattgaacgagtattggcgttgacgtatgtcaagaggaaacccagaggatcgatcttgctccagtactttcatggaaatgttggtgcactggaaaaaaatgctagtaggtttttgctaatggattgaatacttttcgcagccgtttgtatttttaatgcgattgtatcttcacgtaatgatttcagtaggccattggatgacgtccgagcagcggcttagatcgccgctgtaggtagccgttgttttagggcgggtgggcgtattttgaggggtttcaggtaggcgattgctgcaatgtgtgttgcttgtgcttgttgttctgtggctgtctttatggttttttgttcgggaatgttcgggaatgttcgggaatgttcgggaaggccacagtgcttcttggcgcatcggcaggttcttatatgaagaagttctaatctgatggcgtcagagtatgaataccagtaagtcgaatgggggagcttgttagtgcaggatctgtgaggcgcatagggcatgagtccagggatgttgtataactggggtatgaagtgtgaggtaggagatccttttaaaatcggtatttcacactgaaagacgtgtagcgtcctggtcatatttaggaggctagagtctgactaaacaggcacattgccattaggcatttcactgtctggtagcaattaccagcgatgcgggaatgatgatatggaggtggctgcccgggttttgattcggtgcaaggtggtctgtggttgttgttgttggacaggaggcgtgcttctggctatgtgatggagcccaggtagggagtatgtaggatgatattatccaatcaacgtcgccatcacgagtttgtatcgggaaaagcaggaatgaaaggcgttacaaggagggatgagcattatgttacgtcttgtatctaggttttctttttcgggcgttgccagctgtccagtgtggtttgacgtgagcgcgccacagtaagttgatgggctggtgcatcatgagtcagtactgttccggcaccgagtgtggcgccagcacccacactgacgggtgctatcagtgccgagtgtgagccaatgaaggcgccatcaccgatcagtgtgatcgatttattgatgccgtcgtagttgcaagtgatggtgccagcaccaatgtttaccttggtgccgatttgtgcgtcgcccaagtaagttaggtgattggctttactatcggcacctattgacgtgttttttgtctcgacaaagttaccgatgtgtacgccgtcggccagcattgttcccggacgcaggcgtgcaaatggaccgatgagtgctgagcccgttgtggtgacgccttccagatcacagtgtgcgtgtactttggtaccaggtccaagttttacgttcttcagtcgcacgaatgggccaattacgacgttatcaccgagttcgatttctccttctagcacaacgtcaatatcgatgtggacattctgtccgatgcgtattgtgcctcgttggtccagtcttgctggatcggccacgcgtgcgccttgcaggcacaaggcacgtgcagcgcgtatttgccaggcgcgttccagttgggtgagttgccaaagatcattgacgccttccacttctcgagcatcggtaaccatgatcatgttggctggtgtgaggtcggctgtggcgctggcaaagatgtcggttaggtagtattccccctgcatattggtatttgatagtttgcttagccaacggcgtagtgccgttgattcagcacagaggatgccagtgttgacagtatggatgcggcgttgttcttcgtcggcgtctttgtcttcaatgatcgctgcgactttgccttcgctattgcgtacgatgtggccgtagccagctgggtttgcgagctctgtaaccagtacagcgatcggtgtagatgctcttggcaggcgtttcagggtttcggcacgaatcaatggtacgtcgccatacagtacgagtacgtttgctgcattcgggatggccgacatcgtttgtttgactgcgtgccccgtgccaagttgctgagcctgttcgacccagtgtaggtcggtctggtctgcaaatgctgcgcggacttggttgccagcgtggccgtagactacgtggatcgcgtctggagtgagtgcctgtgcggccgtaatcacatgcgcgagcatcggttttccggcgatgggatgcagtacttttggcagtgccgatttcatgcgcttaccttcgccggcggcaaggatcacgatgtgtaggggtagggacagaggcattggtagcgtccggtttcagcgagatttgcattctaggcactccaaccatagtgggaggggcgctacttatgatgcgtcattactttagtaaaacgtaccagtgatcgtattgcagcagaggtaacaaaaatgttgttagtgttagtggtgtctttgggatggcgttgttgaggagtttctctggtgagttgtttggatgtctttgagcttaagcagcacttggggtgattttattcagaccgtggatgtaccgtagatgttttgtttgccgggggactgaggcgttaagccgggtgttggaggttggcagacgaccgctgacttggttcatcgtcgtggctcactgggtgagcgcacagtcggtgtcgcattactgggttcagtggcagaaatcaccgagactgcgtattaatgcgagatgatgaagattgtctaggttcaattgtcgcgcataggcttcggtggcacgggcaatctcagatggacagttgttctgttcacgtagacgcatactctgtgctagtgcgtcaagcagttcgttttgcaggtgatctaagcgatcacgcagggcgataaggtttgggcgcgtccgatttggagccttgccgcgtaattgccaacggttgagcagttgatactgcaccagtttgttgctctcaatttgtgcggagaagaagcgagcagctaagtctgggtctaatctgtactgcggtgcttggtcgcgtacgctttgtaatactgctgtttcgcgtgaggcatcaaggacaggtttaccagtgtcccatttgctgagtgcgacttcgtcaccgatcgcgttgcgttctgctacttttcccagcaaggtggtcaatgtactgggggcgctgtgtgcctggtctgtgtacccgaaaaggctcaggttaatgatgaatgcagcaagatgtacgttgtggcgcaatagggaagacaatgacatgggttttctctagcagtatgaattagggaacgctgttgtccaatgtgaagcgtcctatgttcctgatgtcgaatgatctccgatgtcaagggattcaaggtgtgctttgcggcacgatatgtttatgcgcttttgaactgcgaggtagaattggcgttagacccactctcttgattaccgatatcggtatttctctagctaatagtggaatgggtgatgagttccgatcttctgccggagaaaatgtcagtgtttgactgtgcggcggaggcgttccaatgcttgcatctgcacgacagcttcaactaattgttgttgtgctttagctacgtcaatcgtttcgccacgattggccaggatgcgttcggcttcttcctttgctttacgtacggccacttcgtcaattgtgtccgcacgtattgctgagtctgccaaaatcgtgacgacttgcggttgtacctctaggatgccaccagaaatggcgaagtcgagttgttcgccgtttacagtggtaatgattactttgccaggtttcagacgagtgatcagtggtgcatgtttggggacaattcccagttcgccaagttctcctgtggccacgacaagggtggcttcaccatgaaagatctcttgctcagcgctgacgatgtcacaacggatagtgctcatggatgccatgtgttttctagggtgaatcctgttccaatgcagtagagggttgagctgattcttatccgaggaagtcaatcatgctgtcattttgttggctttttcgatgacttcttcaatgttaccaaccatatagaaggcttgttcgggaagatggtcatattcgccgtctacgattgctttgaaaccacggattgtctcttttaatgggacgtatttacctggggcaccggtgaatacttctgcgacatggaatggttgactgaaaaatcgttctattttgcgtgcacgtgacacggctagtttgtcgtcctcggaaagttcatccatgcctaaaattgcaatgatgtccttcagatctttatatttttgcagagtttgttggacacgttgggtggtattgtagtgttcttcgccgatgatcagcggatccatctggcgactgctcgaatccagtggatccactgctgggtaaatgcctaatgcggcgatcgagcgggatagtgtcactgtggagtccagatgtccaaaggtcgtcgcaggtgatgggtcagtcagatcatcggcgggtacgtacactgcttggatcgaggtgatcgagccatttgcggttgaggtgatacgctcttgtagtacgcccatttcctcggcaagggttggttggtagcctactgctgagggcatgcgaccgagtagggcggatacttccgtgccagctaaggtgtagcggtagatattgtcgatgaatagaagtacatctttgcctttgccgctactgtctttctcatcgcggaagtactcggccatggtgagaccggtgagcgcaacgcgcagacggttacccggcggttcgttcatctggccatacaccattgctaccttgtcgagaacgttggagtctttcatctcgtgatagaagtcgttaccttcgcgggttcgctcgccaacacccgcgaatacggacagcccactatgtgccttggcgatgttattgatcaattccatcatgttgacagttttgccgacaccggcaccaccgaataatccgactttgccgcctttagcaaatggacacataagatcgatgaccttgattccggtctccagcagttcagtggttgaggcttgatcttcataggaaggagcgtttcgatggatttcccattgatctgtataagtgatcggacctgcttcgtcgattgggttgcctagtacatccatgatgcggcctaatgtgccagtgcctacgggaactgtgattgcatggccggtgtccgtggcaatgaggttgcgttttaaaccgtctgtggagccaagtgctatagtgcgtacaatgccgtcgccaagctgttgctgcacttccaagatgatggctgtgccgtcgatcttcagcgcgttatatacttttgggacattgtttcgtgggaattcgacgtcgacaattgcgccgatgatctgaacgatcttaccctgattcatggatggaatcctcgtggcattttaaatgttttgtcagtccaggccggatatggcaagggatcttgggaaaatggtattcagatcatactgcggcggcaccgccgacgatttctgaaatctcttgggtgatcgctgcctgacgtgctttgttgtagaccagttgtagtgtgccaatcagcttgttggcgttgtcgctagcagccttcattgctaccatacgcgctgcatgctcagatgctatattttctagcatcgcttggtatacaagcgattctatgtagcgtctcatcacgtgttcaagcactgttgcggcatcgggttcgtataagtaatcccaatcatggtgtgcgaccttgtctttagctgctagcagtggcaggagttggtcgaagctcgctttctgaaccattgtgttgatgaaacggttatagaccaaatagacgcgatcaagcttttcttcagtgtatgcatcaagcatgactttgatgacaccaatgagctgttctaggcgtggtgtgtctcctaggtgagtcacgctgccgagtatgttgactttaatcctgcgaaagaatacggatgctttctgaccaatcgtgacgatgtcgacttcggcccccttatcttgccactggcgcatttcgccaagcatcttgcggaacagattgttgttgagaccaccagccaagccacggtcagatgagatcacgatatagcctattcgcttaacttgcttgtgtgcgatcagaaatggatgcaggtagtcagtatttgcctgagctaaatgcccagtcatttgtttcattgcctgcgcatacgggcgcgagatcttcatttgttcctgtgctttgcggatttttgaggccgagaccatctctaatgcacgggtcactttacgagtgttctgcacacttttgatcttgcttttgatttcgcgtccgcttgccattgcttactcgtttgattcatagggagggggtgagctgaagctcattcaagcctttacagtagctagcctgaggcccgcccgcagtcgctattgttaccagctgcccgtggtcttaaattcttcaatgtgtttcttgaaagcagcttcaatgttgttgtcccagtcaccggaggtattgatcttgtcgatcagcgcgctttgagtgttggaaaaatgggcgtgtaagctttcttcgaaggtgagtactttgtccactggtacgtcgtcaaggtagccttcgttgactgcgtagattgataacgcttggttggcgacggacattgaggtgtactgtttctgcttcatcagttcagtgacacgttggccgcgctcgagctgcttgcgggttgtttcatctaggtcagatgcaaactgcgcgaatgctgccagctcacggtattgtgccagtgagatgcggatgcccccggacagtttcttgataattttagtctgtgccgagccaccgacgcgcgatacggagatgccggcgttgacagctggacgtataccagcattgaaaagatcagtttccaggaagatctggccatcagtaattgaaattacgttggttggtacaaaggcggatacgtcgccagcttgtgtttcgatgattggtagtgcagttaaggatcctgtttttcctttcacctcaccttgggtgaacttttcgacatattcttcagacacacgagcggcacgctccagcagacgcgagtgcaggtagaatacgtcgcccgggtaagcttctcggccagggggacgttttaggagtagcgagatttggcgataggcaacggcttgtttggacaaatcgtcatagatgatgagtgcgtcctcgccacggtccatgaagtattcgcccatggtgcagccagcgtaggcactgatgtactgaagtgcggctgattcagatgcggttgcggctacgacgatagtgtggtccagcgcatcattctcttcgagttttcgaacaatattggcgatagtagaagctttttggccgatcgctacataaacgcatttgataccggtgtctttctggctgatcactgtatcgattgccattgcggttttcccagtttggcggtctccgatgatgagttcgcgttggccgcggccgatagggatcatcgcatcaactgacttataaccggtctgtactggttgattgactgatttgcgccagatgacaccaggagcaacgcgctccactggtgcagtttgagtggggcctagtgcacctttgccatcgattggttcacctaaagcattgacaacgcggcccaacagcgatttgccaaccggcacttcaaggatgcgtccggttgttttagcgatgtctccttcacgtaaatgttcgtaatcacccagcaccacggcaccaactgaatcacgctccaaattcagtgctagtgcataggttttgttaggcaattcgatcatttctccttgcatcgcatctgccaagccaaaaatgcgcacaatgccatcggaaacgctggtcacggtgccttcgttacgggattctgcggatagtttgacctgttcgatgcgagtcttaatcaattcgcttatttcggaagggttgagcgtggttgccatcgttgagtcctaattgcgtcggcctgggggagctgacagtttgtgagtttcagtgggtcagcgaggcctgtaagcgtgtgagcttgcttttgatcgagccgtcgatgactacgttaccagtgtcgatcactgcaccaccgatcagtgagtggtcaacaccagtggtgacctcaatctcgcagtcaaagcgttttttcagtgcggtgacaatgttgtttagttcatttggtgcaagctcaatggcagatgtgatcttagctttgatgacatgctcggcttcggcgcgtaatttttcatacaagcctgcaacctgtagtaatacatcaagtcgatgtgcttcggcgattacctctagaaagcggacataagctggatccgctccttcgggtgacagtagtgctgcggcttgttcatgatctatttgtggatggcaaagcaacgcagctgcaatgggattgtttgcgacttgcgcggagaatgttaacgcttgtgaccattgcatacacttacctttttcacaggctatggcgaacgctgcacgagcgtaaggacgagccagcgtaagggcctgactcatgggtcaaatctccgcagcgagctcatcaagtaacattttgtgtgtgttaacgtcgatttcacgtttaagtagcttttcagcaccgttaacagcgagtatagatacatgcttacgtaactcctctctggcgcgttttgcagctgcttctatttcaacctgtgccaaattttgctgccgattggtttcagtgattgcttcagcttttgctgcttcgataatttgatgagcacgcgcatgagcttgttcgatgatttcgttggccttttcgcgtgcattttttaatgtctttttaatttcttcttgggcctgagctaattccttttggccgaggtcagcagcagctaaaccctctgcaattttttgctgccgctcctcaattacctttatcaatggcggccaaatcttggttgccacgatccaaatcaaagctgcgaaggctagggattgggcaaagatagtaaatgtgatgtccatagggctctcaattgcttattacggattatggtgacactacaagaagcgagcgtgactccacattgcatagtgtggccaagtgcttcatgtgtgtgtttagccacatcctattacactggatcaaccagctaatgccttgctaactgctacgagaagagtggatgagagtgggttagcaaaagcaagcaacagaccaacggcgacactaataataaatgcggcgtcgatcaggccagcggtgataaacatgcggacttgcaacactgggatcaactctggctgacgtgcggccgactctaggaatttgccagccatgatggcgaggccaagacccgccccaagtgccgctaaaccgatcatgatgccaatggcaagagcagtgaagctctggatttgagcgaaattggtcaggacatctagggacatgattttctccggtaatgaaataattgagggtgaggaagcaaacttaagatgatggggaacaactcaatgagagtcttctgaaaggctcaggtatacgatcgagagcatcatgaaaataaatgcttggagtggaatcacaagtaagtgaaacagcatccaggctaggccaaacgtgctgctggcaagcatgcccgaaatgcctgcaccaccaagtacccagatcaataagaaaacgatctcgccaccaaacatgtttccgaagagccgcatcgctagtgaaatcggtttacttagccattctacaatgttgaggacaaggttgaacggcatcatccatttaccgaaaggtgttgtaagaaattctttgatgaagccgcttatgccctttgcacgaaatgagaagaagagcatcaagaaaaagacactgattgacatcccaagcgtggcattgacgtcagccgttggaactggtttccaagcatgtacacctgcccagctaaatgggatagcgatgaagtcagcagggatcatcttgatgaggttcatcaaaaatatccaaaagaacagagttattgcgattggtgtgaccaacttactcggaccatggtaggtatctttgacttggcggtcgacaaattccaagcaaacctcgacgaatgcttgccatttcccaggtatccctgaagtggccttgcatgtgccgctccaaaatgctaataccattaccaaccccatcaagacagccattatcagcgtgtcaagatgcagtacccaaaatttgctgccgtcctgcatttgaaaagtcagattgtgcaggtggtgttgaatgtatgaggtgggagttgcttcctcgcctgccatgtgtctgggaccttaagtctgaaaaatctttatgattgttgtctggtcatagttaagacttgaaaaaacaagccaattataatgccacttagaagccctaatgcagggagccgccaaaggcaaaagccaagcaatagcgcagtaatcacagacacccatttgagcaaaaacgcgagtatcagtctggctattactgctactgctccttgaactctgccacctaatgcgacttgcgctgacaaccaactacccaatgcgatggctaaacctgtcaatgttgcgccacaggcatattttacaccaaatattagtagagcgagactggttatggttacagcaatcagtgaagatatagcagcgcggagcgcgagtttcttcgtgatgtacgtggaagtcagcacatataagtcccaagtctataccttaaaatttagtgtgcttagtaaagcactagcctggctcttaccaagccaggattatagcaattagatattattagacaagcttctaaagttgtggttaggtatctactctattgcatggtactgcatccaataaagtgtcggactattgggttctgtgtatttgagtgttcgtatcgttttttgttagcttcatgccctctattgggtttgtcgagaagtcgtgatttcgtgtggcctggccgatagctttgcttgctgatgtgcaagaattaataaaaggttcctgggtcgttaagcttcagtccgagcttggtaggttgcatgggtcagggtcaggttaaagctaatgtttagaaagtccaatgatgctttacattatcatgttaactgaattaacgtaatgcatggggtaatgaagtattagggtttagagtttaggggattggtggatttatatccctgctaatacttgctggtaggttttgacatcgcagggggtttgtttctggtcgttgtatgcgatctgacaggtatgtttgcggaggtcattcatttaattgtgggtttttagattgtgtcgatttaatttggtgtaatttagtttgttgtttgagctggttagtaagtcactcgagcatgctcgaacataactgtgacttggtaatggcgttttgatggtgttgttttgctatttttcggtgtatggcttggttctctcgcattactaaccgaagtttttgaaaattcattcctgcattaatcttttgacttggcacaactgtttctaggttagtgttttcaaattgatgtttctcatttctttatgcttttttgctttagagaagaggggcgccataatttgcttgctgtgttgcttgcttcgtcattaagttgcttttcttggatatgcttcttgcttatgaggctggttcggcgtaccatatatcgtttttttattgctccttattgagattgcattgcgttcatagtctctccattgcgctgtgattgcgtcttgtagatggtgtgtcggtttttctatatggttattgagcggctcttggctgttgttcttgaccatcctgtttgaggggtatatactcccgtttcttgcaatttgcatggaactgaagattcgttgttctggtgctgactgtgggtggtttaggcctctattgcttaagccgtccccattgtatttaagggtttgttcaatgaattggttgtgcttgcttggttgcttattgctgtgatggttccggtatttaagtgatctggtcgtgttatttaaaataattatggaaactccttcatggcggaccaaaagattcagattcgattgaaggcgtttgattgtcgcctgattgatcgctctgctggtgaaattgttgagacggctaagcggactggtgctcatgttcgtggtcctatccctttgccaactaagattgagcggtgcaccattcttgtttctccgcacgctgataaagatgcgcgtgatcagtacgagacttgtacttataagcgtgttctttatatcgttgatccaaacgataagacggtagatgcgttgatgaagcttgagttggctgctggcgtcgatgtgcaaatcaagttgacctgaggggatttgtagtcatggggtgctattcaatgggttttgtgggccgtaaggctggtatgagtagggtattccttgaggatggttgttcgatacctgttactctcatagaggcgactgcgaatcgtgtcgtgcaaataaaaacttccgatgttgatggctatgatgctgttcaggtaacagttggttcgcgtcgttctgttcttgtgaataagcctgagtctggtcattttgctaaagcaaaggttgaggccggtcgtgggttgtgggagtttcgtgtcgaaaaaactcagcttggtagttatagtgttggttctgaggttgggttaagtatttttgctgttggtcagaaagtcgatattcagggtataaccaagggtaaggggtttcaaggtactattaaacgccataattttaggatgggtgatgctactcatggtaactctttgtcgcatcgtgcgccgggttccttggggcagcggcagacccctgggcgtgtgtttccgggaaaaaagatgtctggtcatatgggtgctgtgaggcagagtgtccaaaatcttgaagtggttaagattgatgttgagcgttgcttgattgctgttcgcggtgccattcctggtgcttcaggtggtgatgtcctcattcgttcggctagtaagatataagggggggggatgttatggatttgactatcgtcggtagcgataacactctgcctgtttcggatgtggttttcggtcgcgaatttagtgaggcgttagttcatcaaatcgttgttgcgtatcgcaatacggcgcgctctggaactaaggctcagaaatctcgttcgcaagtttctggtaccaccaaaaaatcgaaaaagcaaaaaggtggtggcgcgcgtcatggtgctttgacagctccgatttttgttggcggtggtgttgcttttgctgccaagccccgtagtttttctcaaaaagttaatcgtaagcagtatcgttcggccatatgttcgattttttctgagttgaaccgtcaagggcgattgaaggttgtggatgcctttgatgttgaagtgtctaagactaaggtgtttgccgagaaaattaaatcgcttgaggtggtaggttctcgtttattgattgtgagtgatgggatttcagaatgcttgtcattatcgtctcgtaatttaccttgtgtagatgttcgtagcgtgcaagcgctggatccagtggcgctagtcggctcagacgtggttgtgcttactgtgggtgctgtcaaaaagatcgaggaatggttggtatgaacagtagttgtgaaaaaatattcggcgtactgcgttctcctcgagtttcagaaaagagctctcgtcttcaagagatttctaatgtctatgtttttgaagtgtcgagtgatgctactaaggttgatgtgaaaaatgcagttgagcgtcttttcgatgtaaaggtcggtgtcgttagggtgttgaatgtaaaaggtaaaagtaaatcctttcgcaatcgtggtggctctcgttctggatggcgtaaagcttatgttcgtttaatcgatgggcaatccattgatgttgctgctaacgtttgaggtgtgacaccgtgccgttaataaaatttaaaccaacttctccaggtcgccgttctgctgcacgcgtggtcactccaaatattcataagggatctccgcatgctgccttgttggaaccacaaagtaaaactggtggccgtaatcatcatggtcgtattactgttcgtcacataggtggtggttgcaagcagcgctatcgtgttatcgattttaagcgtgataaagaagctattcctgcgcgtgtagagcggatcgaatatgatcctaatcgtactgctcatattgctttattatgttacgtggatggtgagcgttgttacattatcgctccaaaggggttaaaggaaggcgataaaataatttctggcccgaatgtacctattaagcttggtaattctcttcccctacgtaatatccctgttggtactactgttcacgctgttgaattgaaaccaagtaaaggtgcccaaatggcgcgttctgcgggttcttctgttcaattggtggcgcgtgaaggtgtatatgcgacgctgcgtttgcgttctggggaaatgcgtagagtgctggctgagtgtcgagccactatcggtgaggttggtaatgaagaacataatttgcggaaacttggtaaggctggtgctaaaaggtggcttggggttcgtcctactgtgcgtggtgctgctatgaatcctgttgatcatcctcatggtggcggtgaagctaagtcaggccagggtaatcctcatcccgttactccttggggcgttcctactaaaggttataaaacgcgtaaaaataagcgtactcagcaattcattattcgtggtcgcagaggttaaattactaatgccgcgttcaacaaaaaagggtcctttctttgatcaccatttgatcaaaaaggttgagtctgctgcaggtagtaaacgacctatcaagacttgttccaggcgttccgttattctcccgcaaatggttggtcataccattgctatacataacggtaaaaattactatcctgtggttattaatgaaaatatggttggtcataagctcggtgagttttctatcactcgagtttttaagggccatggtggtgataaaaaatcgggtaaataaggcaatatgaatatggaagcgactgctatattgcgtggtgcacgtatttctccgcaaaaggctcgtttggttgccgctcaagttcgcggtttatctgctgagtctgctgttaatatcttgagattttcgagtaagaaggctgcttgcttgattaagaaggtggttgagtcagctattgctaatgccgaaaacaatcacggttctaacattgatgctttgaagatcaataccataatcgttgatgagggcagaatgctgaaacgtttcatggcacgtgccaaggggcgtagttctcgcattgttaaacgtagtagtcatattaccgtagttgtcggcccggccaagtaattcgggaaggaaaatattatggggcataaagttcatccgattggaattcgtctgggtatatctgcagattggaattccaagtggtacgcaaataaggctgaatttgcgggatatttggccgcagatcttaaagtgcgccaagtgttacgcaaaaaaatgtctcaggctggtatcagtaagatacttattgagcgtccttctaatactgcttgtgttagcatgcacgttgctcgccctggtgtagttattggtaagcgcggtgaagatattgaaatgttgagaaagcaagtcagtgatattatgggtgtttccgtccatatcaatgtcattgaagtacgtaaacctgagcttgatgcacagttggtcgctgaatcggttgctcaacagttagaacgtaggattatgtttcgtcgtgcgatgaagcgttcggtgggtaatgcgatgcgtttgggtgctttagggataaagattagtgttgctggacgtcttaatggtgctgagattgctcgatctgaatggtaccgtgaaggtcgtgtgccgttgcaaactttgcgtgccgatataggttatggtttttctgaagcgcataccaactatggtgttactggtgtcaaggttttgatatatcatggagatattttcagtttttccagtgtgggtcaggaaaagcaggatgatatttcgcgcggtgatcgtaatgctgaccgttcatctcgtcgttcccgtgaggtgaggtgacgttaatgttacagccaaagcgaacaaaatatcgtaaaatgcataaaggccgcaattgtggtttgagctggaacgctaatgtagtcagtttcggtcagtatggtttaagagctaccgctcacggccagttgacggctcgtcaaattgaggctgctcgtcgttcaattagtcgttatgttaagcgtggcggaaaattgttgatccgtgtttttccagataagccaattacaaagaaacctattgaggttagaatgggttcaggtaagggtaatgttgagtattgggttgctcaaattcaaccaggtcgtatgatctatgagattgagggtgtttcggaggatgtagcgcgtgaagctttccgtttggctgcctccaaactttcagtgactaccgcttttgttgtcaggacggtgcgttgatgaatattgaacaatttcgcgctaaatctgttgatgatttgaaggctcatttgattgagttgcgtaaagagcagttttcgatgcgtatgcaactggctatgggtcaatttcaaaagactcatgaaatccgtagagtgcgtcgtaatattgctcgtgtgaagtatgtattgtcttggataaatagggcgtcggcatgatgaatgaccataacgaaagaaagccgttacgtacgattaaaggtcgtgtgatcagtaataaaatgcaaaagacggttactgttttggtcgaacgtcaaatcaagcatgccctttacggtaaatatattaaacgctccactaagcttcatgcacatgatgctgatgatctttgtaatgaaggtgatgtggttcttatgactgaagttgctccaatatccaaaacaaaaaactggcgtgtagtggaaattgttgcccgttcagattaaataaatctttggagagctaggtcatgattcaaatgcagagttaccttggtgttgctgataattctggcgctaaggaagtaatgtgtattaaggttttaggtggttcgaaacgtcgttatgcaagcattggtgacattattaaagtcactgtgaaagaagctatccctcgcgggaaagttaaaaaaggtgaggtttatgatgctgttgtcgttcgtactcgcagtggagttcgtcgtcccgatggttcactaatccgttttgacggtaacgcggcggtgttattgaataataagcaagaacccattggtacccgtgtttttgggccggtaactcgagagcttcgctctgagaaattgatgaagatagtctctcttgcccccgaagtactgtgattggatgatatagaaatggctagtcgtattaagaagggtgaccaagtaatcgttatcgctggtaaagacaaaggtaagcaaggggagattatacgcattgatggtcatcgtgtggttgtttctaatgttaatattgttaaacggcacacaaagcccaatcctcaacggagtatttctggtggcttaattgaccgtgaagcccctatccatgtttcaaacattcaagttttaaatccgatgactggtaagggtgatcgtgttggttttaagattttagatgatggttgtaagttgcgtattttccgctccactggtgaagttattggtgcttgagggattaggttatgacgcgtttggaaaacatgtataagaaagaagtagtgcctgctttaattaagaggtttggttattctaatcccatggctgttcctagattggttaagattacactcaacatgggtgtaggtgaggcagctacgaataagaaggttctagaaaacgctgttgctgatatggctaaaatttctggtcagaggccaattgttactaagtctcgtatttcggttgcatctttcaagattcgtaatggttggcctattggctgcaagactactttgcgtcgctcgaagatgtatgaattcttagataggttgattaatatttctttgccttgtgtccgtgatttccgtggtatccctcctcgttcctttgatggtcgtggtaattttaatatgggtgttaaggagcaggttgtttttcctgagatcgatttcgatgcggttgatgctatacgtggaatggatattgctattacaactacagctaactcggatgctgaagctaaagctttgcttgatgcctttaacttcccattccgtaactgattggagaattaaagatatggcaaagatttccatgattaatcgcgaccttaagcggaaaaggttggctaaaaagtttgcagataagcgtctttccttgaaaaaggttatttcaagtgatgcttcttcttatgaagaaaagatcgaagcctcttgcaaattgcagaaattacctagggattcttctcccactcggttgcgtaaccgttgtgaaatttctggtcgtccgcgtggtgtctactgtaaatttggtttaggtcgtaataaactcagggaggcagctatgaggggggatgtcccgggtttgcgtaaggcaagttggtagttcttgttaagctttgtggtataggatattcaactcgctttagtttgaaattttgatgctactttcttaaagtatggctgatttccttttagccatacaaaaatgattgaattttcgtaatcgtggatatcgatgcgactatatattaaggtgttaacatgagcatgactgatcctatagctgatatgttggttcgtatcaacaatgcagcctctgttggtaaacctaatgtgagatttccattctctagggttaagcttgctattgctctggttctgaagcatgaaggttatatttttgatgcaaaagtaattcagggtgacaatagtaaatctgatatcgagattgtactgaaatattttgaaggtcgccctgttatcagaattttaaagcgtgtttcacgttctgggttgcgtaaatattgtggtaaggccgagcttcctaaagtattgggtggcttgggtatttctattatctccacctccaagggcattatgatcgattctaaagctcgtgagtctggtgttggtggtgaagttctttgtttcgtggcttaggaaggggggggcgtatgtcacgagtagctaagaagcccatttctgttccgaagggtgtagaagttagtgtgcggtctgacatgctaactgttaagggagtgaaaggtgttttaacttttcctaagtcggataatgtaaacgttgttgtggatggcgatatccttacattgtcggctaatgatccttctcatgtttctttggctggtacagtccgtgctattttgtcaaatatgattaagggtgtttctataggctttgagcgtaaacttgaattggttggtgtgggttatcgtgcttcaatgcaaggcgaaaatttgaatctttctcttggtttttcgcatccattggtgtttgttccccctgaaggcataactttgttgactccgagtcaaactgaagttgtggtgcaggggatagataaacagcgtgttggtgaagttgctgctaagattcgtagttttcggccgcctgagccctataaaggaaaaggcttgaagtatgctgctgaggctatcatgcgcaaagaagctaagaaagcgtgatgtgcaaatgtcctattcatcgctgatccttctctttggtagttgaattttcctctgccatgctttttagtatttaggaagtctattgtgagtattggtaagaatgttgctcgtttgcgtcgcgctaaatcgacccgtgttcatatacgtaagttgggtgtccctcgcctctccgtattgcgtactggccgccatttgtatgcgcaaatttttactgctgatggttcaaaagtcattgcggctgccaatacactacaatctcaggttaaggatggtctaaagaatggtaaaaacagtctggcggctaccaaggttggtaagttaattgctgagcgtgctaaggctgttggtgtggataggattgcttttgaccgttctggttatctttatcatggtcgtatcaagatcctggccgatgccgcccgtgatgcggggttgaaattctgaaatctttccttggtttctttggttgcttatttaaagttggagcggggttttttcttgtgctgcctgttcttggggttttttgtctttatgaaattacggcttcaacacttaagctataacttaataactgtctctgggccgtaactatatatccgttcaatctaaggaattaataatggcagaagaacgttcacaacgaaatcgagatcgttctcgtgaagaaaaaatcgatgatggcatgatagaaaagttggttgctgtcaatcgtgtcagtaaaacagttaagggtgggcgtcaatttacttttactgctttgactattgtaggtaacggtgaaggtagtgttggctttggttatggaaaagcgcgtgaagttcctgtcgctattcaaaaatcaatggagtatgctcgtaaaacgatggctaatgtgagtttaaataacggtactctttggcatcctgtgaaggctaaccacggtgctgcttgtgtcttcatgaagcctgcatcggagggtacaggtgttattgctggcggtgctatgcgtgctgtattagaggcggttggcgtgaaagatgttcttgctaaagctattggttcccgtaatccgattaatctagtgcgtgctacattaaagggtttggaggacatgcaatcaccgactcatattgctctcaagcgtggtaagaatgtcagaggctttagccatggttcatgaatacgataacactctgaaagtgtgtttagtccgtagtttgattggtgttccttctcgacatcgtttgtcagtccgcgctttgggattgaggaaggttagtgatatgcgtaaagtaaatgatactccccaggtgcgggggttgattaagaaggttcattacctcgttcgtattcaggattgattgataatgtctcttcgtctaaatgatttaaagcccgccttgggtgctagttcttgccgtgctcgggttggtcggggtattggttctggtttgggtaaaacagcaggtcgcggccacaaagggtcttttgctcgtaagggtggtggtaagatcaagcctggtttcgaaggggggcagactccaatgcagcgtcgtttacctaagatcggttttcgttccagatcagttgctaatactgccgaagtgctttcttataaattggataatttagagccaggtgagattgattttgcttctttgcgtttggcgaaattggttccttcgactgcgaagaaggcgaaaatcgtcaaaaaaggtagattgaccaaagtatttgtattaaagggtatagaatcaactgcaggcgctagggctatgatcgaaactactggtggtagcttccaggagtaacatataaaaatgtctcaacctggtcttggaaatcttggtaatcgcttcggtaagtcgatcgagcttcgtcatcggttgctttttctttttggcgctttaatcgtttatagggttggctgttacgttccggttcctggtgtaaatcctgaggccatgctcgctctgatgcagaagcaaggtggtggtatcgtggacatgtttaacatgttttccggtggtgctctccatcgctttagcatttttgcattaaatgtgatgccttacatttctgcttctattgttgtccagttggctactcatattttcccttccctgaaagcaatgcaaaaagagggtgagtcagggcggcgcaagataacacagtattcgcgcattggtgctgttattctagctgtaattcagggtggtagtatcgcattagcattgcaaaatcaaacagctcctggcggcgctgctgtggtatatgctcctggagctgcttttgtaatgactgctattgttgctttgactgcaggaactgtttttctgatgtgggttggtgagcaggttacggagcgaggtattggcaatggtgtgtcgatgattatttttgcaggtatcgttgctggcttgcctggatctgtgttgcaaataattgatgctttccgtagcgatgcattgagtttgatctccttattgataattgtttttattgttctatcattcacttttttcgttgtgtttgttgagcgtggcttgcgtaggattactgtgaactatgctcggcgtgttgagggccgtaattcttatatgaataagagttcttttttgcctctcaagcttaatatggcaggtgttattcctcctattttcgcctctagtattttagcctttcctgttaccttatcaatgtggtctgggcaagcttcttctaatactgtttttggtgcttggttacagcgcgtttctagtgctttaggtccgggtgagcctttgcatatgattctttttgctgttctgataataggctttgcttttttttatacagctcttgtgtttagttcgcaggaaactgctgatattcttaaaaagtctggtgcattgattcctggaatcagacctggtaaggctacttccgattacgttgatggggttttgactcgtttgactgcggtaggatctttgtacttagttattgtatgtttgttgccagaattcatgcagtccaggatgggcgcttcctttcatttcggtggtacttctttgttgattgctgttgtcgttgttatggattttatttctcaaatacaagttcatcaagcttctaaccaatatgatggtgtgggttttttgaagaaagctaatttgaaaggtgtttcaaaaagacgtcgttttgtgaattaacaaaatttatatgcttccaacttgatataagttttggtagaatatttcttctactggattcactggcgtatgtgtatttcttgatctgaacgcctgagatgtggtcattttaatttggaggttttcctcatggcgcgtattgcaggcgtcaatttggcaattcaaaagcatgtttggatagggttgcaaagcatttatggaattggtcgtacacgttccagaaaggtttgtgatgctgctaacgttgccatttatacaaagattcgtgatttatctgaaccggaaattgagcgtcttagagttgaagtgggtaagtatgtgattgagggcgatttgcgacgtgaagtcggtatggctatcaagcgtctaatggatttaaattgctatcgcggtcttcgtcatcggcgtggtcttcctttgcgtgggcagcgaactagaactaatgctcgtacccgaaaggggccgcgcaaagcaattaagaagtagagagatcctaagaaaatggctaaacagtctgttgtaaaaattaagaagaaggttaagcgtgttatcaccgatggcgttgcccatatttccgcttctttcaataatactattgttaccattactgaccgacagggtaattcgttgttctggtgtacttccggtgcttctggttttcgcgggtcacgtaaatgtactccttttgctgcgcaggtagctgccgagaaagctgggcgtgctgtcttagattatggaatgaaatctttggaagttcggatcaatggtcccggtcctggtcgagaatcggcagtccgttctttaaataacgtcggttataaaattacaaatatcattgatgtgacgccaatccctcataatggctgtcgtcctccaaaaaagcgtcgtgtctaaaggaacgttaaaaaatggctcgttatatcggccctagttgtaagcttgcgcgccgcgaaggcgccgacttatccttaaagagtccatctcgtgctttagattctaagtgtaaattggaacagaggcctggtcagcacggtgctgtacgaaagtctaaattgtctgattacgcttctcaattgcgcgagaaacaaaaagttaagcgtatttatggtgttttggagcgtcagttccgtaattattataaaaatgcttctactaaaaaaggtaacactggggagaatttgcttcagttgttggaaactcgtttggataatgttatttaccgcatgggttttgctgttacccgtcctgctgctcgtcagttggtctctcaccgtcgtgtgttggtcaatgggaagctagtgaatttgccttcgtatcatgttaagcctggtgatgtagttgctctctctcagagagcacaaaagtatttgtgtgttcaagagtctttgactataaaagatcagcatggctccgctttttcttgggttgaggttgactctgaaaagttcagtggtgtctttaaggcttttccggatcgtgctgacttaccttcggatatcaatgaagctttgattgtagagttgtattcaaaataatttatattggaaatcctcccttttttaaaggaggtttataggagatcacgcgacatgacggttaccgtcagccaggttctgcgtcctcgaggtccgcagatcgaacgtcttaccgaaaaccgtgccaaagttgtgcttgagcctttgggtcgagggtatgctcatacattgggtaatgcattgcgtcgtgtcctgctttcttcgattccagggttcgcgattacagaagtggaaattgatggtgtgttgcatgagtacaccaccgtcgaaggtttgcaggaagatgtgcttgaagttttgttaaatcttaaggatgtggctatccgtatacatagtggtgatactgctactctttctttatttaaacaaggagcaggagtggtgactgctgcggatattaagacggaccataatgttgaaattatcaatgatggtcacgtcatatgtcatttgactaaagacactacaatcaatatgcgtttgaaaattgagcgtggttttggttaccagcctgctgttgtccgtcgtcgtcctgatgatgaaaatagaaccattggtcgtttgattttggatgcctcgttttctccggttcggcgtgttgcttatgtcgttgaagcagcacgtgtagagcaacgtactgatttggataaactcattattgacatcgaaacaaatggtacgatagatgctgaagaagctcttcgtactgctgctgatattcttactgatcagctgtcggtgtttggtgattttacgcaccgtgatcgcggtacagtcaaacctgctagtagtggtgtggatcctgtactgctccgtccaattgatgatttggagttgacggtgcgttctgctaattgtttgaaggcagagagtatttattatattggtgatcttatccaaaagacagaggttgagttgcttaagactcccaatctaggtaagaagtcgcttactgagatcaaagaagttcttggccaacgtggcttaggacttggagtgaagttggagaattggccgcctccaggtgtttctcaatatggaatgcttggttaaacttggcttttggggcagatgaagaatctctctcgccatctcttagaaactaatttgttagtcaatggactaatgagatgatggtgataatcgctctggccatttcactattaaataggaataaaaaatatgcgtcaccaaaagtcgggtcgtaagtttaaccgtactgatgctcatcgtggagcgatgtttagtaatatggttgcttcattgttcaagtatcagctgataaagactaccttgccgaaggctaaggagcttcgtcgtgtcgctgagcctttgataactttagccaaggtcgatagtgtagctaatcgtcgtttggcctttgcgcgtttacgaaataaggaagctgtcggtatccttttttcaaacttgggtccgcgttatgttactcgtccgggtggctatattcgtttgctgaaatgtggttttcgtcatggcgataatgcaccaatggcttatgtggagatgcttgaacgccctataattgctgaagaagttacttagtgattcttcacctttctttcaagttgtcatgttatcgctggtggtgttttttagtattttctctattaatttttgatagtcacttatcatgccttctaagttgacttacttctgttttttcatattttttgatccatttctatattgaattacatcaaatgaaagataaattacgccatgctttgtttttgatgagtattttatataattttcctagtttaacgattaagtgatttctgttatctactttttatttaatatctattgtggttttatcttcaagggttttgattttttgtgaaagtgattttcttggcgtaatttgattgaaattcgattaggaaaaattgttgtgtttatgtttcctttttctgtaaagacataaatgattcctccttttaattcgtatgttatttattataagtagctagattaaaagtatttaatattatgcttagtcattatgaatcaggctcagtcaatattattgtatatcctaagagaatagcttcgagcgctgaacggtgtcttatgaaaccgattgtattatccgtgtttcttctgcagccctatattatctagcgttagaacaaatgatacgactctgacacataagcgacctcattatgcaaccaccttcatgtgaatgagcgtgtgtatgatgtctctgatattatctaactaatatgtatgcgtagatcgtatcatatggatgctacagtgataccaatatacagtatcactttgtatggttgcattgatattaaactgttgtgtgccccattagtaggatctttcttataagatctcctaactgtgactcatcggcaattcattgtgattgttagaaggttataagatcactgaatgttttctattgatagtctgcactattgtgaggttgcatagtgttattttgtatttcatttgatgaagacttcaaaataggagcacttaatcagatttttcttaacctcaaagcatgattatacctatgtctcgcttttggagtagatggtattttgattttatttcttgtagagttccagtaattatgatcgatttgaaccatctcgataccattgctaaccatcttagtgacttgcttcctcccgctttgtatgaatcacggggggagctacagactttatttaaagatgtgttacaggctggattggcaaagctggatttggtgacacgtgaggaatttgagattcaacgtgtaattcttttaagtacccgcgagaaacttgaaaccctactgcatacacttgttcttcttgaggatcgccttactgatcagggcaaaaattgaggattctgttatgagcttggctttggtgcatagccgtgctcgtgctggagtttttgcaccctcagttagggttgaagtacatttgtcgggtggtctgcctgcaacacagatcgttggtttgcctgaggctgctgtacgtgaatctcgagatcgagtgcgtgccgcgttattgtgtgcttgctttgaatatccggcccgacgtatcaccattaatttggcgcctgctgacttaccgaaggagggcgggcgctttgatttgccgattgcattaggaatcttggccgccagtggtcaattgccactcgatgctttagcaggtaaggagttcctcggtgaacttgcactcactggagaactgcgttcggttgacagtgtgctacctgcggctttagctgcatcacaggcaggacactggctggtgataccagaaagtaatggtgctgaagcagcaatcgcagggtgttgtgaagcttatactgctcgaactctacttgaggtttgtgctggcttgtgcggtaaaacattattgctggctgctcagaggttcgaagttaaggccgatgtattgcatgatattcctgatatttctgacgtgcgcggccaagaggaggcacgccgtgttcttgaaattgctgcggctggtggacatcatttgttgctgattggtagtcctggttgtggtaaaactcttttagcctcaagattaccaggcttattaccgccagcaagcgagcaagaagcattggagagtgcgtcgattgcctcggtgagtgggcatgatttgaatctgactcattggcgacgacgtccctatcgtgctccgcatcatagtgctagcgcagttgcactgatcggtggtgggggacaggcacgtccgggtgagatttcgctcgcgcataatggcgtgctatttatggatgaattgcccgaatggcaacggaaaaccttggaagctttacgtgaacccatggaatctggtgtagtgacgattgctcgtgccacacgtagtgtggattatcctgcccgttttcagttagtggctgctatgaatccttgcccttgtggttgggcaggtgattcgagtggacgttgtcaatgtggtgtggatgcaattcgacgttatcgtcgccgtatttctggtcctttattggaccgcattgatctacagttggaaataccacggttggcaccgcagctactgcgtcctagtacaccgcgtggtgaacatagtgttacagtgcggaggcgtgtcactgatgccaggactttgcaatataatagacaagcggggcttaatgcgcatctgggccaagccgcaaccgagcgtcattgctgtttggatgtgatcgatcagcagttgctggaacgcgcgatcgaacagttgcagctatcggcacgttcaatgcaacggattctacgcgtggcacgcacgattgctgatttggatggcagcacattaatcaccagcatgcatttgcatgaagcgatcgggtatcgtcgattcgaccgtacagcctttggcattgcttaagcattcgtcaagctatgtagatggattgactatcctgttggagccaatttattacataatgtttccattattcttaaattattgtaagtttcaaggcctgttgtaatcctgtatacaaccaacatgttagttatgtggtagttgttttgcaggcctggattactaccctaattttctattcagactttttaaataagagtgccttatgaatacaagcaatctctataatatataaaaatggttctttgatgattatcgattctagagaaatttgactcgggaattaaaattttcatgaacacttatcatcaaattttggaatattaggtttcatataagttgctgaatatttgtatagttataattccatcatggattggaactgaagaaaagacattgcttcaattatgtgtgattctggagatgaaaggtaagataacaatgatatgatgtgactaatgcggttagtcttgcttcacgcatcgtcacgatatcgtcttagatgacctgagaaataaatccctatttctatgtaaagaataggaactgaagttttttgaaatagtattattcttaaagtgaatgaatacacaagactatgccgtttgctcttatagagtcttaataaacgtgaattctgattgagatgatatttactgattagtaaaattaggaatgctgcccctcattcatattgctgatcgatcacagtagtagtacatatcttttttctataatcaaatggttagattctttctatgatatccgtgaaaaatttctcagatatattcttatttaggagcaacagagaaagtactggtagctatatatcattcgttggatgtagttttggtaagtctgtaatgttgtggcatcacggaaaaaaatagtagattgagctgagatgatacaaaaaatcaccaatgacattattgatgcttgtattctacatgggtaattgcgtgattcactgtgatttgaatcgggcatattgtcggtgctgcgacaactgaatatgtggtttgtccaactcgcattaatgtttgtaatagcatgcttcttaaagcggacctatttgtggaaaatgagcgcatacagtaattaaagaacgggtgatccgctcctgtggagtgagagttatatgtgctgagttcttataaaagatctaccagaatggttgaagctgctgttcatctgtgcggcggttctgtggctttggtttacagatgtttctggataatatcgagcatgctcaggatgctattgggcaggctatggaagaagtatctacgccgcaagtgctcttgttctggcgatggtggccgtgattctataatgggagagtgtgttggaatactgctgatgccatcctggtatgaatcgtagtaaattatattgatgcgtcgctttattaaaatatgtaaatttccgtgtgagtgacgtgtgttgattttgtggttgatcaatgggactctttagtggtgatagtgtcgtatagatggaatgcaccgtaataagtattaagtgccttctgaaagatgataattttatcactcagatcttgctgtatgactgatatgctaatatcattgattatattgtggaggctattaacgatctgctttgtttgatttctatcagcatagtgtgttggatgtcatcattaaatatttaataaactctgatagcagccatcagtgtgatggtggttcaattggggataaaaagataaataaggatatttctgaatagtaggaatttaaagaggcattaggtcatcttcctgatggtgtaatggttatatcgtaatatccctatactgatggattgtctgcctcctaatcattctttgcactgctagctatcggttactgtaatttctatgtgcgcgagtaatggatggaagattattggtcgggatagatacgccaacgatactgtccagcgtactcaaagagtgcagattaattaaagtcatcaaattttaatcttgaacacttttgttgtttttatctcatcaaaagtcagctattttttctatgaatcattattaatgccttattgtttgtttacctaacgaatcggagctgcttttttactcttttttattcatttatatgaatggggtatcgtcgctggtctttcgaataatggaaattaacatggtcacccactatatgcaatcaaataaaaatagagatagagaaaatcgatcaaaatgacattgagcttctcttaactttgaagtaaatgttgcgatgatctttgaggttgcgaaatagctttctaagtcttaatgatagtaatggcttctttttccaagggtttaagtctgatttctgagtgcttctatagtgattatttttgtgatttcaagcttctagtaaatttaagatttatggaagtttgtgcgtaatttttgcaattttgtggatttattggatcgtcattttgataggaaggaggtctacatatcttattttttattatttaattctatttgaaatggattttctaaggtgtgagaatcatttccttagaattttctgatctaaatttttcggggtgtgttgaattgattaattttatttcttataaattaatgaagaaaatgcttgcgtgcgtgatgagcacagtttttttcgttaatatgattgctttagtaatgctgacgggtatgggggttgcgtcggctgcatccaaagacagttatgcggcgacaaaatatccgatcattttcgagcctggttttgggggagtcgataggctatttgttttgattgattatttttaccgcattcccgaggatttgcgggcacatggtgcaaatgtctatctatccacttcgtctgcttttcagagaccagatggcccaaatggtcgtggtgagcaattactcgcatacgttaaggcagtccttgctattaccggggcggagaaggttaatttgattggctatagtcagggtggattgactgtccgttacgtagcggctgttgcacccagtctcgttgcttcagtgacgactatgggtacgcctcatcatggttcggaattggcagattaccttgatgagacctttaatcaaggtctaactgggctgctgtcaccggtgtgggccgggcttaataatgcgtttgcctccatgacaactggcaatccgaaccaggatatgcttgctgcatttaagagtctaatgacttcgcaagtggcgctcttcaataagaattatccaagtgctggcctcggtaaacgtggttcatgccagagtggggcagaatttgaaactgtcgggggagagcgtcaatacctatactcatggggcggtgcagcgataaaggaaaaaaaatcactctttggtaccaaagttattgatacaagcgtgtttccttttattgatgccgcaaattttatcgatccgactacaaaaattttgtatcacttaggtagtgtgatgatcaatcacgactctggtaccaatgatggcatggtctctacgtgtagctccatgttcggtaaggtaataagcagtaactttaattggaaccattttgatgaaataaatcaagttcttgctatccgcggtgcgtatgcggaggatcctttagcagtaatacgcactcatgtgaatcgtctgaaaatgcagggtctttgagtgataaaaaaatattcgtttgtgaatcatcgtattgtgctttacttgatattgggctgcgtggtcgtatgtggtgtttggtactcgttcgatgtacggcaagcaattgatgttggtgcagtcgatttatctctaccgcgaatgtcaaataatctattaaaagaagtcgcggttggagagggaaaaactaccaatcggctatccaggttgcccgttgattctacggtgccaacggtgctgccacaatcgctggctggctccatcgcgccaccgttgccgcttgatgcgtatgggcatcttgcaagagtgagtgctgtgcgggattttttcgattattttttgactgcacagaatgatctaacgcctgccgcacttgatgaacttgttacacatgagattgttaaacaactgcatggcacgtccgcgcaggttgaggcgcaggatgtttggacacgttactgtgcgtatttttcgcagctggtgaagctgccagacttgggtatggtacttggcgacaagctggactttgtggcggtacaacgtgcacttgatcagcgcgcatctcttgcggttcgaacgctgggcgactggagtgagccatttttcggtgcggaacagcaacggcagcgttacgatttggagcgtcttaagatcgctgacgatcaagcgctgacagatgagcagaagaagaagcgccttgttgctcttgaacagaaacttccatcgaaagtacaggaagagcgtataaaaatccaacagcagcaggatgctgttgtgaaaattatccaactccagaaggatgaagtgacgcctgatgggatacgcctgcaagttgtgggcttgcttggtcctgaggttgcttatcgcgtcgcagagatgagaaggcaggatgagatttggcaggaaaaatataagcattacgcagcgcagcgcgtgcaaatcgaagcacagcaactagaacccaaagagcatgatgtacaggtcgaaaacctgcggcagcgaattttcacgaagccaggtgaggcgttgcgtgctgcatcgcttgatcagtaaattgctagcgatatttttatattcttctttctttttttatcgtcttggcgatatggagcattttggagtatagaaacgcatttaagtgtttgggtgtggtacttggtagaggtttttccaagatgtgcacttgatcttatgattcttggaggtgttcgtttttacacgtcttcaagacctgggttgaacagacggcaatagtttcttagttgtcttgtagttaccccttggatcagcatggcaaatgatatttgcatatttcacgttcacttagcgcaacggactttttcttgaaatgctccatctttcttagccgtttaatgtgaagctcggtccgctgcatgaatgctcatgtggttgaatcgattggtgcccggggcgggagtcgaacccgcataacctaaaggtcgagggattttaagtcccttgcgtctaccaatttcgccacccgggctataggtatagggtgcctgattggcgcaagaatgtgaactgcctagtggcgtctatacggtttgtggccggtacgttatcttaagtaatctcacttttatcgtgtaggcggacaagtatttttgagtagcatggttgctgataagcaaggggagccaacgttggcacgcatcgccgtggttggactagggtatgtgggattgccgttggcggttgcgtttggtcgacagcgtccgacacttgggttcgacattgatatatgtcgggtacagcagttgtgtgccggtcatgacatcacttgtgaaattgagcttgaggaactccaagctgcgcgacatttgcgttatagcagtgatcctcgggagttgagtgactgtcagattttcatcattacggtgcctacccctattgatgtggctgagcaaccggatttggggccgcttcgttcggccagcatgttggttgcgtcggtacttaagcctggggatttagtgatctatgagtccacagtttatccgggcaccacggaggaagtctgtgtgccattgctggaggttgggtctgggttgtgctttaatgtcgattttcattgtggttacagtcctgagcgtattaaccctggtgatcgtaagcgtcggctacaggacatctgcaagattatttcaggttccaccccggatattacagctgtcgtggacgcgttatattcgcagatcatcgttgctggtacttggtgtgctccgtcgatcagagttgccgaggcagctaaggtggttgagaacattcagcgtgacgtgaatattgcgttggtcaatgagttggcattgatctttaatcggctcggtatcgacaccttggacgttctcgaagcggcagaaaccaagtggaattttttacctttccgcccgggtttggtgggtggtcattgcatcggtgtggatccttactatttgttgcacaaatccgagagtgtggggtattacccggatttgattcatacggcacgtcgcgttaacagtcgtgttagttggcatgttgtggaccgtgttgtggctttacttggtgagcttagtgtgccgatgacacgtgcggtggtgcttgtgttgggtgttaccttcaaggaggattgtcccgatttacgtaacagccgtgctttggatttggtgcgcatgttcaggactttaggtgcgcaagtcgatgtttgcgatccttgtgctgatccgcagcaagcgttggagcatgaggctgtcacgttgtgtacggagcccaaggccggtgcttatgatgcaattgtgctggcggtggcgcatgcccagtaccgaatgtacgatgtagcgactattgcagctctaggtaagccgcaggcggtggtttatgatgtcaaatcagtgtggccgcgtgcagcggtaactgatcgtctatagaaattatattttcgatgttagattgcgcttttagcttgcgtgtatcccttcgtgcgtttgtgatctcgtatgtactccggagtttgtcttgtaaaacggttgcaatgagtgctacttgggtgtgttgtgtgattgcgtatagggtagttatgggatgtctgatgttcttgtggttggcgaagcaggagatgagcagtgatgtgccgaaattatcttgccagtgcatagaacaaccaatcatagtttctgtaggactttgaaactttgcctcgatctattttttggaatgccgggtagttaatttcgggtataggtattctcaaagttggtcgagcaggccattattgagagtgatgtgtagtcatgagggagcagatgttaacgatggagcggagatgtctggggtgatcttgctatagatgctgttctcagattctttgcatcttgaggtggtatagggcgtatcgccaatccagcgtactaggcagtgataaacagattgtgcttatggttgatcatcggtggttgtggagctgtatgttccaagcgtgatgtttaaacgtgatattaaacgatgtgttattacccattcttgtggcgttagttactgttggtgctttacctatcttttgtgaatatttttagaatctttgaaagatatttaggctaggctttccctgttataagtcaatgatattcgggatgaattcagtatttctgtatgtagtagagtgctaattttcatccagtgtgtgtggagttgttttctacttagtgacgttgggtgaaccagatgctgtagccaaaatatagtcagatgggggtgtgtatagcttggttccttgttgagggggtgacttgctatccggcaagagttagttcagatgtttacccttattcttgattgtgttcatttgctgggctccatttgggttcgctgctatacatcttcgagaaggtcaagtcaaaataggccattaggctggtacaagtgagaaaagtgagaaaacgaagggaacatgtttgtagttaatgatattgctcaggggtaattagggtgcatgacacataggaagagattccttgatgtcattagttttgcggttgagggaatcttcagggttcagtggtaaatttagggtagtagtgccaagcttgcggattcaaggtcgagcttactgattacaaattgcatcattaccagttcctgttcgtcctgtgcgtcgatccacatctgtgcatagcgttttctgcctaaagtaaccacagtaatgcggcggttttcttgacttggcgtgttttttatacccaagtcaagtttgtaccagtaaaatttctcagaaccaatttggctcttctcggcacgatgattgcgagtcatcgggatattagggtcgcgcgttgttaaaatgacgcccaataccatgcggccctcttcattgctggccttacagaatagaaagccgatgccgacgttctgatcccagtgtagcttggatgtagtaggtaactgcgggcagaaaagtgtgccttgctgtgcttgcgcgtttgctatgaaaagaagtgaaagaacgactaatgcttgtatgcgtttcatacatgctattcccgggatagttaatgttgtccatgggaatgcataagccatggtttcgtattcgccagaccggtgatccccgatagaccgatcagcgttccttggcgcatccccgacgcagcgactccatacaacagaagcggagtcgattcctctaccataacgaagcgacagtaacttgacaattgctaggatattaccaacatagagccgttgttttctttggatctttaaatctggaactttttttgagactttataacgactgtaatgtcttgagcacgttttcttagggtataagtgctgtgtttcgatgtgaaatctatagcagggctgcaagattaaccttcgcctaatttaggctataaattgggttgtttgagtttgcttctatcgatactacccttccttatgttgagtagttttctgtcgaaaaacatatggcgtgtgaccttgaaaggatagttctgtatgttcttttctggaaggaggttaaagagtagttttcctgaatgcgcttgtttgagcagactgagcagatgaagattggctcttctcgatagtttttctcctttgtagaaaacataataaaggcgtcctattctagtttaggcaagatattatctttgatagcattaagttaattaacaaatgctgactttggatagggtggaaagcaggtgtcattagattcggcactccgttcggggtagatcaaaagtacttcgtaggacttttgattaaatcaacaatcgctagttttttagctatagctatgagcgcttttaatcttgctgtaacctctggttaactctataatactctttcagatgaggatgctcataaattgaaaaattcaaatttatcaatgccttatttttcttctctttgtggggcatagtaattagacttactcttggtgtttttattcgttgagcattttaaggtggccataaggtctaataataatctgtcgcttaacgttaaatgatgtttcaaagtaatggtaattctccattttatatatctatcacatataatgatagatatttttatatcaaaattaaaaaattaatattttataaatgaggcttggctctggggttctgattaaatgatcggcttgaggttttttaaatactcatatttcttcattacttgcattgtaattaatgggaaattagtttaagggctgtggatagtatagtgatagagattcaggtgatggcattccaaaggcttcccttcccgcttacattcgttagtgacgtgttatgcaagcttttctaaagagtgcggcgctaatatttttatttggtgttcagctataaggggttttaaaattttgaggcggttgatgtgtagggattcttcttgtctatatcacatctattcagcttgtggtaccggtgacaggactcgaacctgcacgctaaaagcgaacggacctaaaccgtttgcgtctaccaattccgccacaccggcaatgcttttttaagcaactaagtatagccgaatcattcaacttaaagtacgtagcctcatgtgtagaaatgatggttttttaataagttattgatatatatttattttttcctaaatttatagaggttgctttgaagaaatgaagaagaggtgggtgatctagtacagttgttttgagggattgattaggtgtcaataatttttactggacgcaaaagtgaacttggcattagtttgtaatagggtttaacacttgatctttcgcgttagtgtggtgtctgttgggggtgctggaagtggacgccgttatcagcgaaaatagcctgctatggtgagggcggcatgactgactttatccgcttcaactacactttcactaaaaattcgtactggcctaatgggtcgtcgaggtaggagtcaacatgccagttttgatcgaatccatcggtaatttggagcgtcgtttgaccttctctgtgccggaagaccgtttggaatctcatgttgatgaacgtttgcgtgaaattgctcgtaccgcgcgtattaatggtttccgtgctggtaaggtgccagctaaagtgattgagcagcgcttcggtgaaaaggtgcgtgctgaggtgcttgatagtttgttgcgtgagactcttgattctgcaattcgcgcgcattcgttgcgtctagcgggcgcagcccgtatcgatcatgccaacgaggggaggcttaattttgtcgccaccttcgaagtggtgcctgattttggcgagattgatgtgtccaaatttagtgtggttcgacgtaccgccagagtgaccgacgttgatatagatcaaatgatcgaaaatttgaggttgcagcggcgcacttggcgtgtcgctgagcatggcgctcaggtgggtcatcttgtggctctggagacttggtcgcaagctggtgatgaacgtttgccgattgaaggtgtcgaagccggtagcaccattcttggttctggtgtgatgttcgagcagattgagcgtggtttggaaggcttatctaagggagatgaaaaggtgttggatgtaacttttcccgatgattggcgtgtaacgcagcttgcgggtaaggctgtgcaagttcatgtcaaagtgatcgaggtttccgaaccagtgttgctggaggtgaacgaagagttcatcaagagtttcggggtgaagagcggaaaattagaggattttcgtgcagatatccgtgcaaatctagaacgtgaattgaagggggcactagtgagtcatctgcgtcgtgaggtcggggagcagttaattgctgcctacgctcatgttgaaatgccgcctcgtttggttgagaaagaggctcgcttaatgttagctaagcagattgagcagattcgactgagtggtcgtgatcctacgggtatccccgatgatgcacatattggttttatggatgctgcttgcaaacgtgtgttggttggcttgttggttggtgagattgctggacgcaatcgattgcgcttagatcctatgcgtgtcactgaaacgctccatttgattgcttcaacctacgaggagcccgaagaggtatttgaaatgtaccgaaatgatcccaaactgatggagggcgtacagagcttggtaatggaggagcaagtgatcgaatggatcgctgaccgtgccaagaaaactgaacaagtgctgtcgttccaggaagctatccagcaataaactggttagttttgcgatcatgttcttcttgatacagatataggcgcttttgttctacccaataacaaagtgagttccttgtgtgcctctgtgctgaacgtatggatgtttaaattagagtcggagatatccgcgtggatgatgtgacaaaagctttaaatctagtgccgatggtggtcgaacagactagccggggggagcgtgcttacgacatatattcgcgtttattaaaggaacggctcatctttctggttggccctattgacgactacatggccaatttaatagtggcgcaactccttttcttggaagcggaaaatcccgagaaggacattaatatttacattaattctccgggtggtgtggttactgcaggtatggccatttacgacacgatgcagtacattaaacctgctgtcagtactatctgtgttggtcaagctgcttctatgggggcgttgttgctggcttcaggtgcgtctggtaagcgttatgctttgccgaactcgcgtgtgatgatccatcaaccgttaggtggtttccagggccaagctactgacatcgacatccatgcacgtgagatacttgctttacgtgcgcgtctaaacgaaatattggctaagcatacgggacagtccttggagactattgctcatgacactgagcgtgataactttaaaagtgctgttgatgcccaagcttatggtttggtagatcaggtccttgggcagcgcccggaagagttgattcagtcttcttgatctctcaaggcattagttgaaaaatatttagttgcaatggaatctgtgatgttgttctgctcatcttgtggtattgtcatggataaatgtgcatatatacctaccgcgctaatcgggtaacaaaagcatgagcgaagaccggccaagccgttctggtgacggaaataagattctttactgctcattctgcggtaaaagtcagcgtgaggttcgcaagctgatcgcaggtccaagcgtattcatttgtgatgaatgcgttgagttgtgtaacgatattattcgcgaggaactggaagagaagtcgcaatctgcgcgttccagtttgcctaagcccaaggagatccttgaggttttggatcagtatgtcattggccagcagcgtgctaagaggactcttgctgtagccgtgtacaaccattataaacggatcgaaagtcggcataagaatgacgacattgaattggctaaatctaatattttgttggttggcccaacaggctcgggcaagacgttgcttgccgagacattggcgcgtttgctgaatgtgcctttcacgattgccgatgcaaccacattgactgaggctggctatgttggtgaggacgtggagaatatcattcagaagttgttacagaagtgtgattacgacgttgaaagggcgcagcatgggatcgtctacattgatgaaatagataagatttcccgtaagagtgagaatccatcaattacccgggatgtttctggtgagggtgtgcagcaggcattgctgaaattgatcgaagggacggttgcttctgtgcctcctcagggtggtcgcaagcatccacagcaggaattcctgcaggtcgataccaaaaatattttattcatctgtggcggtgcttttgctggtctagataaggtgatccaacagcgttgcactgaagctggtggtattggctttggtgttaaggtcaaaagttcagagagtaagcgcgatgttggtaaggtactagctggtgtcgagccggaggacctgattaagtttgggttaatccctgaattcgttgggcgattgccagttgtagctacacttgatgagctggatgagtcggctttggttaaaattttaaccgagccaaagaacgctattacaaagcagttcaaaaagctgtttgagatggagaacgtagagttggaattccgtcaggacgcgctttcagcagtggctaggaaagctcttaagcgcaagactggtgcgcgtggtctccgtactattgttgagttggttctgctggataccatgtacgaacttccttctcaggaaggtattagtaaggttgttgtcgatgaatcggttattgaaaataaatctgagccttatctgatttatcaaacgatgcctgcaaaggttgcttccggcgaatgaatgctccttaatagcgtttcggctattcgcataaccgacactgagagtcgacagttttaaagaaagctcttgtaagcttgcccgaatggcctcataacggggccattggcttttctgttgccgtaaattcaatgcattacactggagtgctaatgactcagtcctctcaaaaaacccttgatctgcaggtattgccgctgcgtgacgtggttgtattcccgtacatggtaattccattgttcgtaggtcgtgaaaagtcaatgcgggcgcttgaaaaggcaatggacgctgataagcgcatcttgttggttgcacaaaaaatggctgacattgacgatcctggtgcggttgatttgcataccatcggtacttatgctcaggtgttgcagttgttaaagcttcctgacggcacgattaaggtgttggtcgaaggcctaacccgtgtgagtgtggatcaagtagtcgagcatgatggtgcgttacgaggttgtggtatcgaaattgcctcgactcaggagcgcgaagaacgtgaaattgaggcaattgttcgatctctgttgtcgctcttcgagcagtacgttaagaccaatcgcaagctccctccagaattgttacaaactttgagtggtattgatgatccaggtcgtttagctgataccattgctgcgcacctgagtgtgcgtttggcgtataagcagcgtctgttggaaactatcgaaattggtgaccgacttgaaatactcattggactagtcgatggtgaaatcgacgttcagcagatggaaaagcgtatccgtggtcgagttaagtcgcagatggagaagagtcagcgtgagtactatctcaatgagcagatgaaggcgatccagaaggagttgggtgacttcgacgatcttccgagtgagttggaggagttggctcgtaaaattgccgaaatcgggatgccaaaattagtccagagtaaggctaagagcgaactcaacaagcttaaacagatgtctccaatgtcagctgaggcagcagtagtgcgtaattaccttgactggttgttgggggtgccttggaagaagtgcactaaggtacgaaaggacttgaaagtcgctcaatctacgctggatgatgaccactatggtcttgataaggtgaaagaacgcatccttgagtatcttgcggtccagtcacgagtcaaacagatgcgaggtccgattttgtgtttagttggccctcctggtgtaggtaaaacttccctcggtcagtctattgctaaggcgaccaatcgcaagttcgtacggatgtctttggggggggtgcgtgacgaagctgaggttcgggggcatcgacgtacttatgttggctcaatgccgggccgggtcgtacagaatctcaacaaggttggcagtaaaaaccctctgtttgtgcttgatgagatcgataagatggctatggacttccgaggtgatccttctgcagcgctcttggaggtgctcgatcctgagcagaataatgcgttcaatgatcattaccttgatgttgacctggatttgtccgaggttatgttcgtggcaacctctaattcgctgaacattcctggtccattgcttgatcgcatggaagtgattcgtataccaggctatactgaggacgaaaaactcaacattgctacccgttacttggtacctaaacagattagagccaatggtttggctgttgaggaattggcgattggagaggacgcgattcgcgacattgtgcgctactacacgcgtgagtctggagtgcgtaaccttgagcgcgagatctctaaaatttgccgtaaaattgtcaaggagattgctttagttggtgtgaagcctgttgctaagaagtcaaccaagtctaaggtattgttcgcggtgacttcgaaaaatcttgaaaagtatcttggggtgcgccgctttgactttggccgtgctgaggaagctaacgagattggcctagtcactggtttggcttggacagaagtcggtggagatttgttgcaaatcgaatctactcttgtcccgggtaagggtaacctgattttgactggtcagcttggtaacgtgatgaaggagtcggcgtcggcggcgttgacggtggtccgttcgcgtgctgatcgcttctgtattgacgtggactttttgcataatcaagatgttcaccttcatgtgcctgacggtgccacgccgaaggatggtccaagtgccggtattgccatggtcacatccttggtgtcaatgcttaccaaggtgccagtgcgtgctgatgtagcgatgactggtgagattactttgcgtgggcgagtttctgtgattggtggtttgaaggagaaattgttggctgcattacgtggaggtatccgaacagtattgatccctgaaggaaatcgtagagatttggctgatatcccggctaatgtgacacgtgctttgacgattgttccagtaaagtggattgatgaagtgttggatttagctcttgaaagtccacttgcacctaaagttgcggcccaattaggtaagagcaaaccgcgtaaggcccattcgcgtgtgtctactgtgcgtggcaagtccaagggatcaagcaatgctcgtgtcagacactgatatacgctatttaaatgtgtgcaaaagtggttcccttaatcgttattgttcatgttcagcttgcgcgtgttggataggcgctggtataaaagcatgcgactcgtggctatacctgttgtgtgcgctatgctaatcaggtacttggtttaaattccttgcctcatgaggcaaaagaccgatttttgattctgcggctcaatgccgtaatgggagtttttagatgaataaaaccgaattgatcgatggtgttgctgctgctgctaatttgtccaaggttgaggcgggtcgtgccattgatgccgtcgttaatgaaattactgaggccctcaaaaagggtgattctgttacgttggtagggttcggtactttccaggtgcgtccgcgtgctgagcgtcctggccgcaatccgaagagcggtgaacttatcatgatcgctgcctcaaataacccttcatttaagcctggtaaagcactaaaagatgccgtaaaatgctccgctggctagggggtgcttagctcagcggtagagcgtctcccttacaaggagagggtcgggggttcgaaaccctcagcacccaccaaagcattaatgattaaagttttgtaaacgtggagcggtagttcagctggttagaatgctggcctgtcacgccggaggtcgcgggttcgagtcccgtccgctccgccatatgtacctgagttctctcaagctttcttaatttagctattccttttctagttgcatgtcgttaaaaggggaagctctaaagcgcgtggcgctggctcagctggttaatatgatgttttctcgtgtcctgctggaggttgtgagctttagtccgtattttctcccctatgtgtctggagctcaggcatcaacccaattcttttaatatgtgaccacatgatctcatgtgtatatagatagagtcggtgcctgcctgcctgcctgcctgcctgcctgcctgcatggtgcttgtactatgtgttgttagtcactaaagctgccatccgtgtctttgcgttaaacaagtggcgcggcttcaagcaggttaaaatctagaatatctcctcagatcttacgattctcaaatatctaatgctgcaaaaactccgtgaaaaaacatctggatggattgcaactgctatcatcggattattggtcatcccttttctgtttgtgatcgacgttcgttacatagagggaggggggaaggacgatgtagcgcagttacaggcttcgccgacttggtggaagtcggcacctgctttttggccaatatcgttattgtggcagcgtcaagggattagcaagcaagagttccagagccgcttcgatcaggcgcgcctgcagcagcgtgctcagcagggcgaaggcttcgatgcacgcgagttcgagaccctcaataacaagctcaagctattagatcagttaatcgaagagcatgtgatgcgtttagtggctgagggcgcgggagtggtgatcagtgatggcgccgtgcgtagcattattgctaacgatcagcgtttccaggttaaaggaaagttcaatcaagatcgctatcgcctgctgttggctcaggaaccgacgatgcgtaccccgcagatgtacgagaactatgtacgcagcatgatgcagctatccatgattcccagcacgatttttgattctgggtttgtaccgaacaccgagttggagcgaatactcgtgttactcggccagactcgcaatgctgagctcgtcactttaccggcgttgaagcttgatatggctgagattagcgatatgcagatcaaagaatggtatgccgctcatagggatgatttccgtcagccggagacactttcgttcgaatatgttgatttggatgctgctcacttacccaggccgactcctagtgaggctgtgttgcgtaaacgttacgatgcccagcaacgcggggaggctcaaaatgagcaacgtaaggctgcgcatattttaattactgcgggtgctgatgctgcttcacaaaaagtagccgaggctaaggctgccaaacttgttgaggaagcccgcaaacccggtgtcgattttgctgcgctggcccgcattaactcacaggatcctggatctaaagatgctggtggtgacttgggttgggtgcagagaggaatgatggttaagccgtttgaggatgtactctttgcaatgaaagtgggtgaagtggtcggccctatcaaaacagaatttggtaatcacgtgatcaaactggaagaaattaaggctgctaagcaattaccgtttgaagcagtacgggatcagcttgctgcagaacaaaccaaggaggacattgataaggaattcaacgatgttacaggaaaactgatggaccttttggtcaaaaatccgactgatctttcttccgcgtctgaacaattggggctgccattgcgcaaacttggccctttgtcacgtcgtgatgctgttggtattgctgctaatcctgcagtgcagcgagtgttgttcaaccacgactttatccaggagggtaaagttagcgatcccattcagattaatccaaatcacagcgtggtattacgcgtgattgcgcatactactgagcagcaactgccgttggataaggtgcgtgagcaagttgttgctgcggtgcgcgctgatcgtgcagacaaggatggggcctctgcagcggatgcgctggtagcacggttgcagaagggagacaccttacaagaggtcgcaaaagctgagaaattgcagattacacctcttaccggtttgcaacgtactgcacaggttccagcgtttgcggctacccgtgcaattttttcggcattatctccggttgcgggtaagccgacggttggtaaggtgcgtttggacgatggtcgctatgcagtgtttacggttactcgggtgatccctggtgatctaacgaaactccctgaagagcagaaagcgatgcttagacaacagcttgatcagattgagggaacgctagcagtccatgcttacgttgatatgatgcgtaagcgcttcaaagtgaccattcacaagtcgcaattgtaacgtgatcgtaagcagcctctcattgtttgattggtacgagagacatagcaagttgctagaaagtcattcttatacagagtgtgcaattttgcttgccatttcttattgagattaaagggggctaagatgcccctttttcttcggcttcttctgccctgattgttatgtggagtgggcaggctttgtgatggttgctagatgcttcgctattgatgcgatatttggagcatattatcggtattagtaccgaagcgagtttcggttctccaggaggtgtatcaggtgatttagtggttgtaagaatcttttgcagtttttcgtgtcgagttaagagtcaaaaattgagtgcgttgcatgtccagatgcatgtaaagagccaaatatgatgagttaatgcacatcgtgattgtggttgttgtgaaccgtgaccgggcacgtgtacttaccactatacgcattgagatatagggtatgtcggtggttatcgagagtggatgcgtctaaaaattaaaggagattcgtttgcttgacagtgatgtatgcctgagtggttcaaagcgatgaatgttttgtacttaggtatttttggataattattggaaaatgcttgtcatttttcgtggttgaacatcattagtctttacagtgggctttgccttggttaagtgctatcaaaggcattgacgatgaacgtttatagcctattgccgctcttctgtacttcaagtattcgatgagtgtaatgggtgatccaaatcattcatgtgaatcgccttggtaactgattgctttacatcaggtgtgcaggcgctaattatctcgtgaattgagtgggtgaaagcatttaccttgcttgacttgcctgggctgttgtggattccggtttactgacgacttcttattggatagccatgtagtaatgaaagttcatgctgttaaaggatgcttgtttttaaggttcgatctactgggagatgtcccggttgctgttgtgaaatggagtgattgtcagcttgtatctcgattttcattgcagttcagtgtgtggcgcccgttaggtaatccctttagactgttcctgtttcaccttggctgacgcgggttcccgtgcagtctggttacttgctgctgtttacgtctaccttatgtgtgtggacgactccagttttttctttccctttctatgcggttgtagcagcgcatacattaagggagtttagttcatgcttcttgttgttctggattctttatgctccgcgattttcgaatttctttcatctttaccgccttctgtcttagtttggctgcttggtgggggtacagcactgctctcggtgtctggcaggcactgtggctatgcttagtgctgagtgtgctggaagtttcgctgtcatttgacaacgcggtgattaatgctggcattctcaagcacatgagtgaattctggcgaaagctgtttctcacgattggcattttcattgctgtatttggtatgcgtctggtgtttcctattgtcatcgttgcggtcgcgaccggcatgggcttgattccagtgatgaagttggcgttggaacaccccgagcaatacagccaagtgctgacggatcactacccttcgattgctgcgtttggcggtatgttcttattgctggtgttcctcaactttctgtttgataacgaacggcagctgcactggttgggtccgattgaacgcatgctcgccaaacttggtaaggctgatgctatcgcggtaattgtcgcagttgcttgtttgatgggcaccaagtttttcttgccttatgaagtgtttcaggatgtcttgtttgccggccttggcggtatcctgctgtacttgttggtcgatagcgtcgatgcgctattcaagatggacggacaggaggatggggtgatggggccggggaagcgttccggcgtcgctgcgttcctgtacctggaagtgcttgatgcctcgttctcattcgatggggtgatcggggcgttcgctattacccgcgatgtcgtcatcattatgcttggtcttgcaatcggcgctatgtttgtgcgttcgatcactttgtacttggttcgcaaagggacgttggatgaatttgtttttctcgaacatggcgcgcattacgcgattggtgtgcttgcggtcatcatgctagttggtaccgtatatcatgtccctgaggtaattactggactgatgggcgtggctttaatcgctgcttcgctctggtcctcgtttcaataccgtaagcgcttaatttaagcgcttaattactgttggtcgttgagcggcatctatttttattactgggtaggcaacgcttccttgtgtcccatcaatgcctgccacctaataatgattgcccctttggattcacttgtgattgtcagtggtaattggttgggtgtgcggcggtgcaatacctgagtgagaattgagtcagtcaccttttacaaagaaatcggtggtttaactcgttgcgatgattctggtgaccagagattgtggctggcgctggtggcttggctgggtgcccgatactattgaagtttacgttggcttcatttgtatttgttcgattgtcgaccaatgttgggcgtgcgtgtcgtggtggtgccgtatcgcttgcataacggcctttgttatccgtgtttcacgatcctcctgtacccgaagtcattgaagtgccaacctatgcttggccacggcagcactatgtgtgtgagttccaagatgatgcgtcgttctgagtgcgctttcctgtactttgagtgatagtgtgtgacgatgattgaagagtctcgccgcgctgtgtctgagaagtgtgtgagtgcagttgatacttggggtgcatccattgaaatctgacctgttttgagcaggaataatcagttgtgtcttgttgtcaagcacatcttaggatgtctgtcaaactctccctatattcttgaatgtgcaacctgttgatgtggttgtctggccagtggtttgtgatgcaaaaaataaaaccaacggtgcgtcaaaggcttgggtgatttcacagcattttgtgttgacgatgccattcctccccattatcttgtggttgttggcccagattgatcttacgtcttcaggagcgtttggaggtacagcccccctgcagggttgggtatgactatccccggcggaattggtaagtgttgattgtcatccttcgtccgttgggctgggggcgcctaaatcgatgcggttcctgtctgcccgtccccgttgcgtaaaacagctgacaaccgcgtgcatagcacggtacgcggtccctgttttggtatctccctaatggggtagagggtgtgtaaatgttgcccgtagctctgtttgtgcgagctgtatgtctacctgctgttgtttccaggtccactaaagctggtttctacctcactgcttgaggtagatccgtgtatcacatgatggaggacgcatgattcccaaagagcaatttgctgcggctatcgctgattctttacccaatcctggccatgtcgctgggtctgttccgcctgttgcgttatctgtcttccatcctgatgaaccggaggacgaggtgcctatcccacgccaaactgccatgatgcatactcgggctgtggaagaagccaatgtgtctacctggattaccaaagaagcgggtaaccgccgtatgccgttcgactgtgcgcgtttggagtgcgctatcgatacgattcaccaagaattcccacaattggacgtggctgaatataagcgcgcggtgttcgggttcgtcgaacgtaaggatagcgttaatgctgatgacttggttgatctgttgatccgtgaggctgaggcacgtgttgacctgactgcgccggagtgggagtacttcgctgcacgtttgtatctgcgtcgcttatacaagcgtgccagccgcaatcgcttctacgatgccagccagaaatacggctcgtttgtcggtttacaggagagtttggctgaccgcaatatctattccaacgatattttgcgcagctactccaaggaggagttgatcgaggctggtcagatgatcgatcctgagcgcgataagctgtttacttataacggcttgtacttattggccacacgttacttggcgaccgatgcttctcgcggcgtgtttgaattgccacaagaacgttggcttaccatcgccttgtatttgatgcaagacgagtatggcccaggtaaaggtggacgtgagcgccgcatgcaactagttggcgaagcgtactgggcactgtctaacttgtacatgacggtggcgactcccaccctgggcaatgccggaaaaatcaatggccagttgtcttcgtgcttcatcgataccgttgacgacagtttgcagggtatttacgactccaacaccgatattgcgcgtgtgtccaagcatggcggaggcgttggtgcttatttgggttacgtacgctcctctgggtcaatgattcgtggtgtagctaactcttctggtggtgttgtgccgtggatcaaacagctcaacaacaccgctgtctctgtggatcagcttggtcagcgcaagggtgcgattgcggtttatttggatatttggcaccgcgatattgaagcgttcttggatttgcgtctgaataacggcgatcagcgtttacgtgcccatgatgtgtttacctcggtctgcattcccgatttgtttatggaagcggtcgaacgtcgcggcgattggtatttgttcgacccatatgaggtgaagtgcgttaaaggttggtacctgcaggatttctatgacgagaagaggggtgaccccaacggcagcttccgccgtaagtacgaggacgttgttgctgacgagcgtatcagccgtaagacggtcaaggccattgacatctttaaacgcatcatggtcagccaattagagacgggcaatccattcatgttctaccgggatgaagtgaaccggaagaatcccaacaagcatgttggcatggtgtattcgtctaatctctgtactgagatcctgcagaacatgacgccaacccggctcatacaggagatgatcagtggcaatcagatcgttacgaccaagcaggctggtgatttcgtcgtgtgcaatctgtcttcgatcaatcttggtcgtgcaatcacggtgcaggctgatttgcttggcgccgatgtactggagcgtctgatcccgattcaggtgcgtatgcttgataatgtcattgatctgaatctgctgcccgtcccacaagcgaccattaccaatcagaaataccgtgcgattggtttaggtactttcggctggcatcacttgctggctcagaaggcgattcactggaattcgccggaggccgagcaatacagcgacgcactgtatgaacgcatcaattacctgacgattcgcgcaagcatggaattggctaaggagaagggcacctatgcagtgtttcccggcagtgactggcagaccggcgagtatttccgcgcgcgtgactacaacagcccacaatggcttgaattagctgcccaggttgctgtcaatggcgtgcgtaatgcctatatggttgcggtagcgccgaacatgagtactgcgcagattgccggttccactgcgtcaatcgaccccatctatagcgcgttttactacgaagagaagaaggattaccgccgcccggttgtggcacccggattgtcgctggatacgtggccgtattatgaaaagggtgcttataagctcgaccagttcgcgagcatacgccagaatgcccgccgccagcgtcacgttgatcaatcgctcagtttcaatttctatgtgccgagtaccatccgtgctagcacgttgttggatctgcacatgacggcttggcgtgagggcttgaagacgacttactacgtgcgctctaacgacattgacatcagcgaatgcgagtggtgttcaagctgatactgtttgctctgcctgaatttgtagtctatcggtcctgtgccggtgtcctgcatcgtttgaattaaatgaccaacatggctatctcattagatcgcatcaagattttggaaccccgtaatcctaatcgttcgacagggattattaacgggaaaaccagcggcatcctgaattggaacgacatcccgtacccatccttctaccgggcgtacaaagagttgtcgaccaacttttggatcccggacgaggttgatatgaagatcgacaagcgccaatacggtgaactgtcggcacgcgagaaaaacgcttatgacgccatcatcggtttgttagctacattggattcaccgcagacacgtttcatctataacgttgctgagtacatcactgatccggcggcacatgccaatgctgcgattattgggcagcaagaagtcattcacaacgagagctacagctatgtgttggcctctatcactgacttggccaaccagaaccgtgtgtttgagatcgctcggacccatccgaccattctcaagcgcaacgccccaatcatgcaggcctatgacgacttcatgcgtgagaaaactgctgagaccttgctgtactcgctgattcaatcctcgattcttgagggcattaatttttattctggctttgcctatttctacaacttggtgcggcagaaccgcatgactggcactggcaagatcatcagctttatcaaccgcgatgaattggcccacaccaagttcatcagtgaggtgattcgcgccattgttggtgaaaatccggaattgcaaaccgatgcgttgaccgattacgtgcatcaagcatttgcgcatgcgattgagctggaaacacagtggactggtgaggtacttgatggcattgacggtatcgacgtagaggagatgatccgctatgtgaagtaccgcgctaataaaatggctggcatgcttggtatccagacgctgtacaccgagactactgataacgtcatgccctggatcagggcctatgcagacaattttaccgagacaaaaacggatttcttcgagatgcgtaatgccagctataagaagactaacgtagacaactgctttgacgacttatagctgatgatgccatgcgaattctgcttgctctcgcttccctaagtggtaacacacgtgaagtggcccgtatcatcagggcgcgctgtgaggagagagggcatcgcgtggattggatcgagactgacttgcaaacgcttgctggacaagcgcttgatccacgtacctacacgttatttctgctgggtacatggactgataacgctggtcgtaccccgtttgagatgaagcgtttcattgccgaattgttagagctgattggcaagccaccctcggtcgcagtgtttggtacgggcgagacacaatgggggcaggagtattattgcggtgcggtgcatcgggtcgcggattttttttccagccgattcccgcgtttgttgatcgaacagatgccgcatggcgaacgcgatgggcgtgccattgctgaatggatagatcaagtcttggatcaatacaacaaggattccgatgcagatcattaccgctacgtcgcctgacgaattcaatgccgccttgaaggcgcattcccgcctgttggtggacttctataaggaacattgtcctggctgccgtatgctcgatatggccttgaacaaatttgctgcgaccgaggcggtcgctggtgtggtggtgttgaagatacgtttggagacgataggcgaggatttctttcgtgacttggggttacggcaaactccgaccctgggggtgtttaagaatggtctggaggtctcacgtttgcttgggtttcagtcattagctcagattgaggccgctgtacagacgtatctttaagatcggataagaggttgttttgcgttatttcatgattggccctcagtgccatagcaatagatctttgctttatcgttccaatgcccgaggacgtggtagatcatctaaatcatggcgttgcaatgcaaggttttggcgatgatccaaacagtcattgtgtgtgttgttagcaccgtgtcatgtgaagtgactgcctacggcgtccatatttggatttcacgggtataacgccatcagtattgagagtattgatgttcattcgtacggccttctgatatgtggtcagcgttgcattgcggcggattgcataggtattttggtcagccagctcattgttagtgtttgccaatcaccacttactatatgggtatgggcagatgttgagagtgagttacggcatgatgcgtagggcaggtccgtatgaaattactcaagtacattgctaatcttggttatgggagccgtaaagaggttgcccgaatatttagagaaggccgtatcacgaatggtgaaggtgaagtgttgtatgccgatgaccaggtacaacacattgcggttcgttttgatggtgaaccgttggatccgccgcctggattaatggtgatgctgcataagccttccgattatatttgttcgaccaaggacgcggggcgcttggtgtatgacttgttgcctccccgtttccgcttgcgctccccgttgctttccacggtcggtcggcttgatggcgataccagtggtctgttgttactcactgatgatggtgcactgctgcaccggatgatctcgcctaagacacatcttcctaaagtctatgaggcgacactcgtgcaagcgttgcggggagacgaagcaacgttgtttgccagcggcaccctcctgttggatggagatacaaagccgttgcaaccagcagtgttggaagtactgggaccatgccaggtacggttgacgttgtatgaggggcgttatcaccaagtgcgacggatgtttggtgcaacgggaaaccgtgtcaacacgttgcatcgcagtgctatcggtggcttagtcctggatggacttccggaagggcagtggcgtgtgcttgaagcccaggatcttgcgatgctgttttcacacgggagccgatgacggtgagtgctccgttgtcattcatgcccgaggcggtgatcttcgacatggatggtctgatgcttgatagcgagcgcgtgagcatcgaatgtcggtgtcgtgctgcgtttgatcttgagcagcaaattgagccggattactggttgcagatggtcggggtgagcgatatcgcttgtcacgcgcagctgagcgcacgcattggtgctgtaccagcgacagcgttgttggcacgcagtgatgcgttatatgaggcggtggttacgaagggggtgccgcatcggcccggcatcgttacgttactggagtggctgttcgcgcgtggtattccgtgtgcggttggtacgtctacgcggcgtccgttggcgctgcgtaaattgaatacggcaggcttattgtggcgtttcaatgcggtgtgtactgcgagtgacgttgcgcaggctaagccagcgccagatatttatttattggctgcgcacacgcttggtatcgttccggggcgctgcttggtggtggaggattcaccgattggggtacgtgccgcattggctgcaggtatgacgccaattcaggtgccagatttgctgatgccggatgctcaggtaagcgcgctggggcaccggattgtggcttcattgacagaggtgcagagcctgttggaagcgtgttttgatgtctgaacattcttttcgcgtcgtgtgtggtggatgtgatcggtggggttgtctgccctgtgttgtgtatgtgttggtttgtcagtgatgtgagtgtgtgccttaggtagtgtggtatcgcctttggttctggatgtgctcagcctgctggtgatcctttttcctcacttggggtgttgtgcagtgttatgttggtagcagtagcagtagcagtagcagtagcagtagcagtagcagtagcagcctgttgctgtttgtttctgtattgcgttgcgctctttggtgaacatgtgtcgtacatgctatttgcttgttatctacttagttatgagggaagtatccatgaggatgtcggttgtccttttttctcaagtgttgctggcctcagcgaggtgtgctgaaagtcgtttcccgtgatgtacatcccgttgatgaggttttgcggcatggtgttattgtcagtggagtttggcggtgtaccacttctccctcagtgtttgtcgctgttggttacatgacgttgtagagtcgtggtgatgtcccattgcgcttggtgtcggtggagtcgacagtggcacgttccgttgaaatacttgaggtgagcaggcgcgagccaggtttcaatgtgctgccgcatgggcaggtgacattggtgctggtggcacccatttgatgtttatccagcttgcaagccatgtgttgctggacagcgtattgaggtgacgccggagtgtgaatatggtgtacacatgtcagtgcattttgaggtgcatccattcagtgtcacgcaggcagccaagatggggtgatagatacgtgggccacttttaatgaagttgatgtagtcctgtgtggttcattctatttgagtgccagcaagcacttgctgccagcctgtgtggccgagacatttgagtgtgtggatattgcgctgcacgatgacgtttggatcagggaatgcggctatcgcgtgatccacgcttttctcccgcagcaggtgcaagctagggtagggagagcggttggtgtagttgctcatatcatctggtgcggtgccgtggaattgatatttcgggtggaagctggccacttgcaatatgctttgtaaatctaacgtcttgatgatcgcgtcgacattgtcgaggaagtcgttgtaatcaaggaagtcagtcaagacgtggggatgcacgatcaatgtggtgtcgatgtgttcggctggtgtgtcgcgtagcaatagtaattcttttgccagatgttccagtagtgtttcaggtttggttgcgtcactcagtaccaggcgtagctgttgtttgatgtaaacggctttggcgaatgggcacaggttcaggccgatgacagcgcgttcgatccattggcgtgtcaatgcaagtgggtcggcaatggtggcagtcatctcgtaggtttgaggctgaggattcgaaattgtaggaggtcgtaagtgggccttgttagccttgatgagcgggttgttgtccgtatcgtcggtattttatttcgatgggttggtttattactttgaactgttgtgtgccgcgttgcggtgctttgcattgaagtggtgactgcactgggttggtagtcagggatgatttatgttgcgattgatgttcagtgtgagtgaatgtatgcagaggatgattcacccaagtaacggtcactgggcttggtttttttccggatgtggcataattttctgtccgacttgatatgccaccgttgcagtttagcgggaattctactgtgtttcggtgagtgcttgcgatgtaagggatagccccacataataagcgggttgctgtgttaggtctgtacattggccgcggtttggggattcagttccctgactgttttgttgcagtgagtgtttgattcccgatgccgcgttgtgcatttcgtgtcgtcggggttgccgtctctcagagtatgagggacaccgtcagagctcgaccgtggtggtcgggctcattaacgattgaggtgcgcaatgtcacgcgtatgccaagttaccggcaagcgtgtgcagacgggtaacaacgtctcccacgctaataacaagacccgccgtcgcttcttgccaaatctgcataagcgccgtttctgggttgccagcgaaaaccgctgggttaaacttcgtgtttccacctgtgctgtgcgtactattgacaagaatggcattgatgctgttcttgctgagctgcgcgctagcggcgagaaggtttgaggagtcatccatcatggcaggcaagcgcgacaagatccgccttatttcttcggctgatacgggtcatttttatacgactgacaagaacaaaaagaacactcctgggaagcttgagtttaaaaagtatgatcctagggtgcgtaggcatgtgatctacaaggaaggcaagattaagtaagtgattgtttttttattttgtttagagatgctatttgtcaagcgtcatttccgttttcttagtgtggtgcatcttctgtgctggtggagtcaggcgctagttggttgctttgcgatgactccgaaaggttctgacatagagccgtcctgactttgtgctgaggaaagttctttgtaggtttggatggaaggaacttggctgtttgcattggattgggtgatccgtttggttgcgttgctttggattccagcacgaaccacccctagtgctgcacgcagctggttattgctgattggtttcgtccctgtatttggtttgccgctttacttggtgtttggccatccttggctgtcacgtaagcgtgtgttgcgtcaggcgttggcttctcaggtgatccgtgagtggcagcgtgggttgagtgcgttgcgctggcagcctcaggagaatagtgtcgccgcggaattggtgcctttggtggagcatcagggcgattttatgccaacacgtggtaacgccttggatctattggatgattaccaatcttcgctgcgtttgttgatcaatgatattgattccgcgtgcgaacgtgtgcacttgctgtattacttgatgttcgatgatgcggtgggtgatgcggttgtggctgcattacagcgtgctgcggcgcgtggcgtttcttgccgattgctgctggatgcagttggtgctaaacgcggtctacgtgcctatcagcagtgccttcgtgcgcatggtgtcgaggtgcacgctatgttgcctggtgggttgcgctggcgtcgcagtgggcgtatggatttgcgtaaccatcgtaaaattgctgtgattgacaatcgtgtcgcttatatcggttcgcagaatttggcctgcccagattttgtgccgcatttccctaaccgtgaactggtcgcacgcgtgtgcggtcccgcggtaagtcatctggaggcggtgtttctcagtgattggtttgttgaaactggtcaacgtttgaggatgcgttcagatgttcccatatgtgagcaaaatgttgcggcccagctagtggccagcggtccggcttacccgtacgagaatgcgcgtgatgcggtgaatacaatgatccatttggcacggcggcgtgttgtcttgacgacgccgtatttcgtgcctgatgaggctacactcagtgcgttgcgtattgccggcacgtctggagtagacgtgcagttgatcctgtccgagagtaataatcagtttctgatggcctgggctcaggaggcgtacttcgaggagctgttgcgcgcaggaatcaaaatcgcattgtatcgtccccatttcctacatgctaagcatctaagtgtggatgatgatattgcgttgttcggatcgattaatttggacatccgctcgtttgcgcttaacgctgagatcggcatgatttgttacgactcacgtattgtgagtcggttacgcgaggtggagagtgattatctggccaatgcgtgccagcttaatttggttgagtggcagcaacgtcccgcttggcgtcgtagccgtgagggtattgcacgcttggcagatgctctgatgtaggtcttgtggatgcgtgttgcgtaccgctattgcaatcttgagttatccgattgctgatgttttgttggtgaggttgcaggtgcgatgtcagcactgtagctattttatgttgcagtaagtccgtgatagctgtgcttgattgaatgatctatggcattttagggagtggcaaaaaagtctggtttgctttggattgctagacgtgcgtgtgttcagatgagcatgggcggcggctatgttttctttagtgcagatgttgctttgacgcacagacatacagtgactgaaaaataagttagttcattaaaagcactctttaggttgggataagtgtgcataattcggttccattgttattgcggagttcttcaatgaagttgtacatcatgccaggcgcttgctctttggccgaccacattttgttgcggtggtctggttcttcatttgatcttcagtttctcgaccatcagagtatgaaggcacctgaataccttgctctgaatccttcaggtgcggtgccggcgttacaagtgggtgactgggtattgactcagaatgcagccattctcaattacatcactgatattgctcctgctgagcgtgggttgtctggtgacggtagcctgaaagcgcgtgcggagatcaatcgctggattgctttctcaaattccgatgtacatcccatgtattgggcgctttttggaggcaccgcctatttgcaggatccacaaatgattgcacgcagtcaggacaacgcccgccagaaattgcgtgtgttgtaccagcgtgctgatgcacatttgaagcatcacaattggcttgctaacggacagcgttccggtgctgatgcgtatctgtacgtcacgttgcgatgggctaaaaaagtcggtgtggatctttctagtttggatgcgttatcagcgttctttgagcgtatggaggctgatcccggggtgcaggctgcattacaggcggaagggctgatctgattgttaatgcaaggcgcgtcttcgtgtgagggtgtttttgtcgctggtgtagcggccagtctgaatggagtttgctgagcagtctcaatccaagaatgtcaaagcccgggtaaatcgggaagcaatgggccccggacatcagtcggtgcccaatcgctgatatatctcagttaacgtaacagatgcgcgatactggcacgctcttcttccagttcggccagcgttttgtcaatgtatgttttgctgaaggtgtcaatgggaagatctttgacgatgctgtattcgccattggtggtcgtgactgggaaaccaaatatcattccctccggaatgccgtaggaaccgtccgatggcactcccattgtgatccacttgccgttgctgccaagcagccaatcacgcatgtggtcaatggctgcgttggctgccgaagctgctgaagacaagccacgtacttcgatgattgcggcaccacgcttgctgacggtgggaatgaagctgttagcgttccatgcttggtcgttaatcgcctcaataattggagtgccatcggctgtggcgaaacggtaatccggatacatggttgggctgtgattgccccatacaatgagtttttcaatgttggcgacaggcttacttagcttggtcgataactggctcaatgcgcggttgtggtcaaggcgcagcatcgcagtaaagtgtttcgggtttagatcaggggccgacttcattgcgatgtaggcgttggtgttggctggattaccaacgaccagcactttgacatcgcgccgagccactttgtttaaggccgcaccttgggcggtaaaaattttagcgttttccatcagcagatctttgcgttccatgccagggccacgggggcgggagcctaccagcaatgcgacgtcggcatccttgaatgctatgtctggattatcggtaccgaccatgccagccagtagtgggaacgcgcagtcttcaagttccatcatcacgcccttaagggcagcttgtgctttctcgtcggggagttcgagcatctggagtatcactggcctgtctttgccaaacatttctccagcagcgatgcgaaatagcaatgagtagccgatttggcctgcagcgccggtcacagcaacacgaacaagtgatttcataggatgtttccctgtgctcaatgaagtgatctaaaactggtggggtgttgtgggaaaacggcaatgaagtatgggatagcatatccatacaagaagtggaacaaggctatccttggtgagtaggatgttaaacattaggtggcaaggatcgaattccacttgatgatgcgatcagctttaagggctagtacgctatcagcatcgccttcaatcgtgattttgttgatgatgtcgccttgggcgattgcatcgaccacatcctggccatcaactactttcccaaataccgtgtgtttgccatctagccatggcgtcgctacatgagtgatgaaaaactggctgccattcgtattagggcctgcattggccatcgacagtgagccgcgttcgtggctcacaccattgttggtttcatcttcgaagcggtagcctggaccaccgcggccagaaccttcggggcagccgccctgaatcatgaaattggcgatcacgcgatggaagtttaaacggtcgtagaagccgcgcttggtcaaattgacgaaattagcgacggttaatggagctttgtcagcgaatagattgattttgatcggccctcggacagtgtctaaatgagcaatgagatgcatgcagatcttttccttaaaaaattaagcgttttcgcatgaataaaggcatagaatacacccagcaagcttattgcggctcccctcttgcttcccgtcaatgtcggtagcaagtttgaaatagcttctatttgtttgtatctcgagtgattgtccaacgcgaatttaatctaaatcggtataatcctcatccttcttaccctagcttccttacgacgggtgcaaaacccgggtcgtttcgcatgtccatagaaaatctacgtaatatcgccatcgttgctcacgttgaccatggtaagaccactcttgttgatcagttacttaagcaatctgggactttcagcgaacgtacccaggtgggtgagcgcgtgatggacagtaatgaccaggaaaaggaacgtggcatcacgattcttgctaaaaatacggcaatcaattggaacggtaaccgcatcaacattgttgatactcctgggcatgctgattttggaggggaggttgaacgcgtattgtcgatggttgattcagttctactgttggtggatgcaatggatgggccaatgccgcagacgcgcttcgtgacccagaaggcttttgcaatggggttcaagccgatcgtggtggttaacaagattgaccgtcctggtgctcgtccggattgggttgttgagcaggtttgggacttattcgaccgtctcggtgctacgccggagcagatggactttccgattgtctatgcctcggcactgaatggctatgccagcttggagtcaagtgcgcgggcgggggatatgaatccgctgtacgaagcgatcatgcagcacgttcaaccgccgcaagtggacctgcatggcccatttcagatgcgtatcagtcaattggactacaacagttatgttggtctcattgggattggtcgcattcaacgtggcaaggtgtctactaacatgccggtgacggtcattgatcgcatgggtaataaacataacggtaaagtccttcaggtactcggtttccttggtctggagcgtcatgaggttgaggaggcccaggcaggcgatatcgttgctatttcgggtattgagtcactcagtatttccgatacccttactgacccaacgtccccagatgcgctgccagcattgagtgtggatgaaccgacaatcagtatgacctttcaagttaataattcgccatttgctgggcagaaggaatattcgggggggaagttcctgacaagccgtcagatccgtgaacgcttggcacgcgaaactttacataatgttgccttgcgtgttgaggatactgaggatcctgacagatttaaggtttccggccgaggcgagctgcacttgtctgtcttgattgagactatgcggcgtgagggctatgaattgggtgtatcgcgcccggaagtcatcatcaaggaaatcgatggaatactccaagagccttacgagcagttagtcgtggacgtggaggaggagcatcaaggtggtgtgatagagcgcttgggcacgcgtaaagctcagttgtcgaatatggagttggatggtaaggggcgcgtacgtttggattacattatcccggcgcgtggtttgattggttttcagactgagtttaagaccatcacttctgggagcggccttctgttccacatctttgatcactacggcccgaaagctgatggtccgattgccaagcgtatcaacggtgtcatgatctctaatggtcatggcaaagcacctgggtatgctttgatgggcttgcaagaacgtgggcgtttgctgattgatgctggtgaggatatttacgaaggtatgttggttggcatccattccaaggataatgacctgaccgtcaatgcacttcgcgagaagcaattgacaaatattcgtgctgctgggaaggacgatgcgatctcattgaccccgcccattaagatgtccctggagcaggcgttagagtttatcgaagatgacgagttggttgaggtcaccccgaaggcaatccggttacggaaaaaatatcttagtgaaaatgatcgcaagcgtgccagtcgtactggctgaagaagcgaggccagcaagtgtgactgacaaaccatgtaatccggattcccactcgcattcgggacttcatgccatcgccttattcgaagcattcaaggggttacttacgttagttggtgctactggactagaactacttggccctttgccgcttcagaatatcgtctccaatttgattaggcttctccatcttgatccagagcatggtttcttaccttctttgttgaaaatgattgatcccaatgccgtgcatttggctgcagttgtcatgttggcttacggggtactgcatctgatcgaatcttggggactgtggcgagttaaagcctgggcctcgttcctggggtgcgtgtcggcggcgatctacttgccgtttgatatctatgcaattatccatcatcccggttggccctcttggagtgtcctggcgatcaacttgctagtggtcgcagtcttgacgcgtgacttgattcggcgtcgtatgcttcagcgctgcattaactgacatgcagttcagtattcttcccggtatggcaacatttcatatgcgtatcaaactgctttcttacttttacttttttactttctatcactacatttaagcttgaaggaccttatccatagactgcctattatccttggcgcacttctttgaagcgtagagatcattaggagtatgaggaaattgagcatgttctttggagtggcagcaaagtacacgtgccagagtgcttttactgatgagaccgagtaggtataaaaccgtagcttggtcttgctaccactgtatttaccttttgtgtcaagtgtggcattcaagcagcgtatcgttgaaaagttcagacaattggtatgtattgatggccataggccagacagtaagtggtacaagctgttacgacaaattgatgaaagcaaaattgaacgagatatggttattttgtgaattgcaagcttagaaaaggtaaagccctagcaatactctatgttatccaccattaatcagaatcggttataaattgctaacaagtatgcgcaatagcgaagaaaaaatgaaattaacgaaaatatgagttgcactgttgattgagaaattgttataactgcactaattaaaagtgtgacttccatcaattgtgaaggatttattccgcaaagaagtacttgaggcaaagcgcaccagttggcttggcggtatctctttgatccaaccaattaaagcatggttgttagtgcttgcatccagcgttatggcactgttagttgtggtttttctctacgtagggacttacactcgtagatccagtgtaacggggcaactcgttccatctaaaggacttgtgacggtagtcgcccctgccacgggtatggtaagccagataaaagtgtcagagggagctaatgcgctttctgggcagatactcgcattggttacagtgccgcggactactcttgccagtggtgatgccaccagagccttggagcagcagttgcaggagcggaagcagggattgtcgatgggtcaacaagctcaagcgcaagtgctatctgcacaaacatcagggattgaagcgcaactgagtgctgcgcaacgtgaattggcacaaatcgaaattgagattgcgactcgtcagaaacagatacagattgcaaacgaaactttgcagcgtttgaagcagttagaggatgcgcgttatgtgggcaccctccaaatcaaacaacaggaatccactgtactggattacacgagccagatgcaggcaatgcaacgtcaagctatcatgacgcgacggtctattgctcagttgcaacaatccttaagggaattaccgggacagtatcagaattcccaggcaacctacagacgtgaactggcgcaactggagcaggaaaaggtagaaactgaggctcgtggtgcgctttcggttgtttccccaattgatggaatcgtggctacccagattgtcaagtctcagcaaacagtacaggcggggcagccgatgttgagtctgttacccgtgaatggcgagttggaagcagaacttctcttgccgagtagcgccattggttttatcgagcaaggggatgaggtccgtttacgttaccaagcttacccatatcagaagttcgggcatcaacgtggtcaagtatccagaattactcgtagtgcgttgacttcgaacgagcttggagcattaatcggtaatactcaacaaacccaaccgtattaccgcgtgatagtgaagcttccgcaacagtccatcacagtctatggtcggcatgaacccttaaaacctgggatgctcattgatgctgatattcttagcgagaaacgtcgattaatcgaatggatatttgaaccattgtactcattgcgaggaaaggttagtgataattgatttttctattgatagtgttgatcttatcttaaatatataagtcaagtctatttattgatattttttcattatatcttcttttgtattaatatggtggtatgatattcttagtttggacactttatgggtaatatttcttaataattaacgttaattttatttacttctaatcttgttattcgcataatgcagtctcttgaaaattaatttatattggaataaattatgggaattgataaagtgcgtgagttgacagtacgggaaatcgaaagtgttgatggcggcgtttattttttaaatcttaattatagatctttgggtggtttgattagagcccctatgctgacgttttttggaatcggaaatacagcgattgcggtaaattttggtcggggatcttccttttacatcaagccgacactcaatatcgacactgtgaatgctacaagcatcacccaggaagtacatcaagggacttgaatattccaggtgctattttgcagcaattcttactaaatctgaggaaggatgaggaatcattaagggagaggggggattcggaatgattgaaacaaacgaatgtgggatcttctcgctccttattttcattatcttcccaataaccgcccatggaaatgaatcaaatgcgtgaacttgctttccaagaaattgaaaacgttgatggtgcttttttcttcgttatttatcctgagagtttttccaacggaactgtttcttctatttcttttacaactggttctagtgtaactgggaactctggatctcttacgttgccagaccctgttgtctctggacctgttttgtctgggataggctttttcggaactggcactggatttttaaggacctccagccggcatgttactatcggtacagtaaatttatacaatatcatccagaaaataaatttataacatcacttcgtctgaagcaataatttagccaattttagaattctttcttttcttttttggcttttattaaaagatgattaaattcattaatagttaaggaacccaatgtgggacatactcaaagcaaaggaagatgaaaacctttttctcctgatcgggttccttttattttttctgtaatctcccctcttgtttttgttgccttcttaataatcaatcatgggagtaaattaaatgcgtgaacttgttattcaagaaatcgaaagcgttgatggtggcatttttttctttgtttcccctaatatctcttcttccacttcgtttgactctttccaaacttctgctctgacacccccgttcaaacatactggatcaaatgtaagccttctgggatttaacttttggaggatcgtttcccaagatttttatgtccgaagtgtgaaaatttataatatcatccaagaagtaaattaataaaaagtgaatctatcattgattttatagttgtcttgcgctaatctaaaaatggttataaatcattaggcacaaaggaatccatgaggttgctctttgtccctcttgattttttattttttaaatatctattgggattaagtgaatgcgtgaaattactgtaaatgaaatggaaaatgttcatggtggttgctgctgcgaaattattatcggggcgagtatttttattggagctgtggctataggtctactctcgcttgctgctataggtataactgtactcgcagttactgctatagctgttgctatgcataatgatgcatccagcattagtgctagccagtgattttagtttgggtcgttacttaagatgttgtttactaagaatgtaaacaacatctccttgaagaatataaattaaccagcctgtagataggtggggcttgggagcggcctggggcggtattagaaactgataccgtcctttattttttatggaaaatctatttaatattatattgtctacttgcgataagttgagaggaagctctagtatggatcacctaaaatgctatcgattactttaatgaagttcttgcgtcacgtttacggatgctactcaaaatctccttaaagtataaaatttaccatatggatttaaaatgagacctgttttgcaatctgaggtcagtgagtgtggtttggcttcgctggcgatggtagccaatgcgcatggtaagcatctgaccctatcccagttgcgtcagcgttttccctcatcactcaaaggcgccaaactgactcatttggtccatattgcacagcagctaggcttttctacgcgtccactacgcctggatatggaagatctgggtaagcttaagttaccttgtattctgcactgggatctcaatcactttgtagtactggcaaaagttgggaccactaaggtcaccgtttacgatccagccatcggtaagcgtaagctttcactcaatgaagtgtcaaagtatttcactggcatagcgcttgaattgacaacaacgaccgaattcaagcagcagaaaccaccgccttcaatttcagcacgtcagttgaccggtccaatccgagggttgtggagggcattggcgcagattctgttgctctcgctggcgttacaggtctttgtagtgctctcgcctttctacatgcaatgggtcgtggatcaggtactggtctcggctgatcgcgatttactggtggtactggggttgggcttcggattggtattgttgcttcagatcgctatcggtttgttccgtagctggtcggtgatttacctgtcgtcaaggcttggtctgcaatggatgggtaacgtattcgcacatctactgaagcttccattggagtactttgaaaagcgccatcttggagacttgacttctcgcatgtcttcggtgcaatcgatccagaaaacgctgaccaccagttttgttgaagcgattattgatgggctgatgacgctcgtcacgcttggtttgatgctcgtttacagttggaaactggcgttggtaaccttggtagctgtggcgttgtacatggttatccgtgctgtttcttattggccagtacgtgactgcaccgaacagcaattagtcgttggagcaaaacagcagacccatttgctggaatcattacgtggtattcaaagtttgaaagtggcatgtgaagagtctctacgtcgttctacttacgagaatctactcaatgacacggttaaccaagaagtgcgtctggcacgcatgtcattgggtttctcaaccgctagtcagcttgtgttcggtctggagcgtattgcagtgatctggtacggtgccacattggcattgagcaatgtgttctcggttggcatgttgattgcctatttatcctacaaagatcagtttgctagtcgaatctctagcttgattgataagtgggttgagttccgtatgctgcgtctgcatggtgaacgtttggctgatatcgtcttgacccctccggaggaagattatgaattgccggaaatgcagctaccgaaaaaagaaccagatattgaagtggaaggattgtcgttccgttatggtgaagacgaaccatgggtgctgaaagattgcagcttcaaggttgccgctggcgagtcggtggctattatcggtgcttctggttgcggtaaaacgacattgatgaagttgctccttgggttgctcaaacctaccgcaggtaccatacgtatcagtgggcgtgatttgcataaattcggtacacgcaatgtacgttcgattgttggtgcggtgatgcaagatgatcaactctttgcagggagtgtcgctgataacattagtttctttgatcctgatttcgacctggagcgtattgaagcggcagcaaagctagccgcgattcatgaagacatcgccgcgatgccaatgggataccacgcgttgatcggtgatatgggcagtgcgttatccggtggacagaagcaacgtgtgattctagctcgtgcgctttatcgtcagcccaagttgctgttcttagacgaggcaacgagccacttggatgttatgcgagagcgtttagtgaatgatgcagtacaccagttaaaactaaccaaagtcatcgttgcacatcgccccgaaaccattgcgagtacggatcgtgtcgtgatcttggatcatggacgtatcgtgcaaacagtggcaatgccagaagatcgtgatgactcaatcgaaatagtgcataacacgatacagagtacgtgacgatagtattttgcattactgcgataatatggcaattcaaccttggtcgtttcaagtattgcgtgtggtttcatcgcgatatcatgtttgtggcatctatattctttaattttgagtgggtgggggcgattggatcagatgatagatgagtggcctacctaccgggtttgccacacacgctactgaatgtttatgttttgtatgtagcgtgatggctcctccatgtttcatggattcagatcaaaacgctctagaactatgcatctgtgtgtttgtttcatggttgtttattctgaatatcctcaacggctacgctggtgtttattttttggggtatttaggcttgatttatttcttgttgatcgtcttttctttggcaagtgacatctgggcagtaattcagagggttataacgctgcatgttttgtgtttaaacatgcggtgagtattaagttccatagaatccatgcttagtaccaaccaatcgattcgacaggcttgtaaatttgtattcctaatctatttcccgtcttagtaaccacaacgataatgcactgagtcctgcaatgaatgtcagcatgagtgcatatgctttccacaatggtacgtcgctatggcccagcaagccgtagcggaaggcattgaccatgtaaaagattgggttcgcataagtggcagcctctgcccaacctggtagcagtttcactgagtaaaatacgcctccgagatagctcaatggagttagaacgaacgtcggtatgatcgcaatgtcgtcgaactttttggcgtaggtagcgttaatgaagccggccagtgagaagatgattgcccccagtacagctgtacttgatgtcactagtgggtaaggtagccgcactggagtaaagtacatcgcgatgaccatcacgatggcgccgaccatcacccctcgtagcactgctcctgcgacgtagccccatagaatcacccaatttggcattggactcaccagaagctcctcgacgtgtcggccgaacttggcgccgaagaacgaagaactgatgttaccgtaactgttctggatcacactcatcatgactaagcctggtacgatgaagtgcatatagtcgaagccatccatttggcctacgcgtgtaccgatcaacttgccaaaaattaaaaaatacaagcccatcgtaatggctggtggcaccagtgtttggctccagatgcgtaatatgcgccgcacttcacggcgcacaatggtacttagagcggtcaggttgcgctgagtgttgcttggtgtgtttgtcacggtaagggtcgcatgcggtagtggaatataattagggtatggttgcgtacgttggcatgcttgcagcgatgttgcggttttacgtgctggtcaaacgtataaacagctcttccagacgattactcttcgtacgcatcgaacgtacctggatgttagcagcgctcagtgcagcgaacacatggttcaggtccatcgcgcgcggcatgcttaagtccaacgtgtgatcgtccaaagcattcagcgtcgtgtcctcaatgcttggcagctgcgccggtaatgttccgtcgatatcaagaagaaatccctccacgtccaattttgcgagtagtgtacgcataggtcccttttcgataatctgaccaccgttgatgatcgctaagttacggcataggctttctgcttcttcaaggtagtgtgtggtgagcatgatcgtggtgccgttagcattgatctcctgtaacacacgccacatatcacggcgaatctccacatccacaccagccgtaggttcatccaggatgagcaaacgcggttgagtcatcatcgcacgggcaatcatcaaacgtcgtttcatcccaccagacagagtgcgactcattacctgtgccttttcccacaggtgcgcgcgtttgagttcaatctctgccagtgcctcagctttggcgtacggtataccgtagaagccggcgtagttgatcagaatgtctaaaggtttttcgaacaggttgaaattgatctcttgtggtaccaggccgatcaatcgtatggccgcactacgctcgcgtaccaagtcaatgccgaacacttcgacactaccgctgcttaaattcactagagaactgacgatgctaattaaagtggacttgccggccccgttggggccaagtaaagcgaaaaagtcgcctggtgtgatgtccagactgatccctttgagggcctgcgtaccattgctataggtcttgtgcaggttatacacgtgcagagcgggtgtattagggatagtggagttcaaacgggattccttgggtgcctgagtggaggtatggcgacgatattggcgctgattatatgaagatgtaagggatttgtccgaactatggagtgttccaaaactctacgtgactgttcaatatttcctaatacacttgttctgacaatctgttcatgattgtgtttcctatcacttaattaccgttttatgtccgataacggtgcctctctggattgtcagcatcgtgagtacgtgcaagcttactttagtgcatatcgatggtttgggggactaagtaacacagaacgccgacgattgtttagttgtcatttgtgatgacacacttcaaataaataccatcgtaatacacgtgatgtcagagataaaaatcacgtgctttttgcgatgcacaacagatttctttcccaggctgccacctgtacttcgtgtacagatggccaatgtctctcccctctgattttctcagagctattacttgaatgtgagaggtatttccaataaatgatcgaaattagatttcttgcgtagagtgtgacgtatggaacgtctgttcagagaagtttcgatgcttgatacgtttgaaaggatatccgtatcgttagtgattctttctttttattgttacttatattattcttgatgtgtatacgattaatatatttaattaatttatattttattttaattgagaatactaacgggttgaaatttataatttagattcttattatttctctttaattctgcgtgaatttttattctttattgaataatatgcaaaagagtttattgagcgtcttatctgacattttaggattcattagtgcaagtgttctattaataatggttaatattttctaagaaacaaggataaaggaacaagattcgatggtaggtatgagcaggattattctcaataacgtcttcttttttagatgtgtggttgcggtgttctcggcacactcgttggtcatcagtggtgtggtacatgcgggggtgcagatctcccagtccccattgcatggtggcggcgacgtgccaggcaacctggctattgttgcgtctgtcgagtttcccacggtgatcagcgtggctaacttggacaaaacctacatgtcaggggtgaagtatgtcggctacttcgattccaacaagtgctacaaataccactacagcaaccaggagagtgatcgttacttctatcctgttgcctctccaaggcctcaagctaattacggttgtaacaccacaggcggtgtgtgggctgggaattttctgaattgggccgccacccagaccattgatccgttccgctctgcattgaccggtggctatcgcgtgcgcgacacagtcaacgagaccatcttggaaaaagcagtgatggatcgtgcttatcctggaaattttccgcgtcgtaccgtccaaggcggaactcttgccgcttcagtacctgcagagtggaacagtttcaatatccgtattgatgggctcggcaacaggatgcggtttactcaggcgacccgcggcttcttcagtttctggcaagagccgttggagacagaggggcaagcttataatccttccaagcacccattggaccgcaatgataatggtgtttacgaagtgagtgtccgagtcaaagtgtgcgatgccacggtcggcttggagtccaactgtgttgcttatcccagcggcttctacaagcccgaggggttgatccagggatattctgaacgtattcgctatagcgtttttggctataaaaacatggacgagtacatggttgatggtggtgttttgcgtgcacgccagaagtttgttggaccccaaaccaactatccggagcaaggtaagaaaaccaaccttcatgccgaatgggatccgcaaactggcgtcctctatgacaaccctaatcctgaggatgctgcggcgactacccagcgggtgggtcgagccattagcaattccggcgtcatcaactatttgaacaagttctcccagatggagaccggtaagaataccaaggggttcgatgctgtcagtgagctttactacaccgcaatccgttatttcaaacgcttgggcaatgttccagagtattcggtattgactggttcggtaactcaaaggtatcagcaggccgatgcgtttccggtgattacggagtgggatgacccgattcgctatgcctgccagagcaatgtcgtactgggaatcggtgataccaacaccaatcgggataagaatctgcctggtagcaccagcaacatggaagagcctgccaaaccccaagcggtcaaaaatgatagaagcgttgacgtggtcacgcgcatgacccagatcttctatatggagggcatgagtgcaaggaatgcggtcaatgcggccagagcatctaatttcaacgcaaacagtaactctgcttacatcgccgccctggcttacgatgcccataccaaggacatgcgccctgatcttgaaggggatcagttactgaccacacattgggtcgatgtgatcgaaggtggaagttttaaaactccaatcaccaaccaatactggttggctacgaaatatggcggatttcaagtgcctgccggttacgatccagataagacagccaacgccctccccgaggcgacttggtggaccaacggcgagtacgtcaataacgattctgccttcaagcgggcggacaatttctacattgctgccgacgcagaaaagatggtagccagcctcaagcatgctttctcgcgcatcgttgccgacaccaagggggcagggacgggattgtctagcaatagcgctagacttgaaaccggtgcggttacctaccaggcacaatttttcagtggcacctggcgtggtgatctgattgcctatcacgtggataaagtgaccggcgcgctcaccccattttggaacgccaacttcccggcatgggaacagcgtgttatcacgtttgctaatggcaccacactgcaagacttcaccaaaaaaaatctaggccaaaccgcgctggcatcggcgagtgcgcagcagattaattacctgcgtggtgatcgcagccaggaaggcaatgtgccaggcaaactccgcatccgtagcggcatcatgggagatattgtcaactcccaaccgctctatgtcggtgcccccaatggacggctgtacacaaccgcgagcttcaccggggcgagctcctatgccgcgttcgtcgcccagcaggccaaccgtgccccggtggtttacgtgggtgccaatgacggcatgttgcatgccttcgatgccaataccggtaaagaaatatttgcatttgtgcctcgcgcggccatgcccaaattgctggagtacaccgatcagaactacgtacaccagtactacgtggatggtgaactgaccgccgctgatatttacgataccaaatcggggtggcgctcggtgctggtggggacgttgggtcgaggcggcaaaggtctgtttgccttggatgtgaccgacccttccaatattcgtttgctgtgggacaaaacgtccacggagattggcggcttggggaataccttgagcaaaccgatgattgtgcagacctctgatgcggtctggtcggtattgcttggcaatggtcccaacagcactgcggataacgcgcaactgatcgtgatgaatctgttgaccggtcatgccactcaagtggttgttagtaaggcttcaagcaatggattgtctggtgtgctgccctggtccagccagagcaacggcattacggatcgcgtgtacgccggggacctgctgggcacgttgtggcgctttacttttagcgataacgcttggaaggtggccccgctgttcactgccacgtatcaggggaaggcacagccgatcagcgcaacaccactgggggccattgagcgctccacggggcgcatgtggatcttctttgggactgggcgtgtgctgtcttcgcatgatatggataacaaggaggtacagagctggtatggcctgattgaccagggaacgacgattcctgggcgtaccgggctgagccaggtacagattgttgatgagggtgtagtcaatgggtatgccgtgcgtacggtttctgatcctaagaatgtcggtgctgatggctggtatatggatctgatttcgccgaagtccggtaagcagggagaacggatgattgtgtccaacatgttccgtggagcggcgttgatcgggaccacccgtattccggataacagcgacatttgcaagctcggcggcagtgggtttgtgatggcgatcaacccattcactggtggccggttgggtcaatggttttttgatctcaacactggtggtggcagtggtggtgcgttgaatggtaaaccggtgtccggtgtgggtgtgagcagtgcgccgaatagcccggtatttaccggcaatatcatgcaaataggggcggatgacggcacggttacgtcgttgaagacgccctccagcggcggcctcaatataaaccgtgtgtcatggcgtgaaattctgaggccataatccacaaaaaaagagatggatagagccgctccaaaatttgcattatttctacaatggttggaagctctttaaaaagcgtattacgtattcagcggcagtacgcaataaggaatgctcacaagaagctcaatgctatgcttgtgttggagatgttggcaaattatctaggcgcgacacaatggaggtagcggaccgggcattgcaaaaataagggcatatttctcaagtttgactgccacgcatcgtgcctgacattttttactcacttcaataagtacagcgctatcttccttacttgagtgacaaaaccacctgtaaccgggagatggtagagaaaaacagcgtaccaatcatccagattttagtatggcaaggacagagtgtgcggacatcattgattacttggcttcagataccgactgcacgttgttattagtttggcttgggataacatgcactccacgcgctttcatccatgcgtcgaactcatcggctgtcatgcgcttaccttgttggttcatgttgaagcgccagggtgtgttgtcgtaaatggtttgtttcttgtaatcggtttctgttttgttatttgagttggctgtattttcggttgaagtcgttttcgtttttgcgatactttggcgactatttacccgcaagtgcagcaacatggggtccattaaatactcgccgttgtaaggttgtgacagtactttgcccggtatgcccaatggggtttttgggggattgtagaacatcttgttcagcggtgtaaccaccgtcgttggggccgattgattaaaagggttattgacagaataatgcggtgtggaagcctctacgataggagtcaacaagacatagagaaacccagctgtagcgaaacgcagcatagtgagatttatccgctggatggaaagtgattgcagtttagactgcggctgctgtgctttcaatcaattttaattgagatatgaataactaatgagaaatactcaaaaaagtgcgtaggttttgaatatgcattgacattgtgtggtgctgccttggatctaagcctatatttttctatatgtattaaatatctctccataaagggattttgttaggttattataaatattaagttaataaaatatttgtcaagccacattataattgtgtgtcgctgtggtattgaagataatttctattttctggggttgagatgctgtgttattcgccaatcagtccgtcgttggctaatttttttccggtttcggtatatttagttctgaaggttattttattggggtcagtgacctgtaacagcgttctttatgatttcgtcatgcttgatttgcttgttgacagtcagttgcccggttgaggagctatctgtaggtggcattgtgtcgtccatttctcaagcaagtctgaaacgcgttgctgttactggggcggcatcgcttcgttctggatgattcgtaaagtacgttgtacgcgtgcttgcgttttaaaaaaacgatgatccgcaggccatgccatgctcatttattgtatgtaaaacagagcttccgatctgatctaatttagtaatggtgccaaacgctgtccagggggatccctggcttgtgcggtggtgacacgctgtgcttgccaataaagacgatcagtgattgcttggcaagataaagacggattctttatgaagaccgactttatctcaaagattcttaaataccagcaccacacgtttgtgaggtgtcattgtaaataccgtagcgtttttgcgtgtacagcgaatttgcctcgtgagaaggttacccactgttggtatcggtaggagcggctgcactgcgatgacggtgaatgctacgtcgtacttcaacgtggtcagcatgctcattcagaaggtgttcgcctttaccgttgatgacgatgttctttttatgattcatcttatatttacggtagatcatataaccagctagccccgcgctcactgctgcgacagcaacggcaatgctggggttgcgtttgatgagcttaccagtcacttttccgctgcttttaacgacctccagggcagcgccgctcttcaaccactggctggcctgcggtgtggtgcggcggatgcggtcattggcctgctgagcgaggtccatagtgtgtttgagagcacggtcggtcatggcggtgagcttgttcataaatgggttccctgtccagtgaaaagcggctagcgtgtatgtactgcaatatattagggcatatcatgccagtgggcgctgatatctatctctttggatgatgctcagccaagtatgttccgtagcggtgtatgacagcgcaataactcaactgctgttctgcgtatgctaaacgattgctgcggggatttcgcgtgttcttcattggatgatccagtgagaacgtacttataggtttcgttggcatcgttaccatgacaactatattacttcccaggtgatttcgtgcggtgggtggcggttgcagtccatggatcgtccggccatgggtgttttggatagcgtcctttcatttctttcttcacttccggatacgtgttagtccaaaaactctttaaatcctgagtcacttgcagtgggcgcccgccaggtgagagtaggtgtagggtgagagggatacggttttttgcgatgcgtggggtatcgggcagaccaaataattcttgtagtttgaccgcaaggactggcggctgcggcgtgccatcgtcggccaatccatagtcaatgtggcgctccatcccggacggtacgatgatgcgggcgggtgcgtgacggtcgatgagtgcgtgttgtgtccacgacagtagcgatttgactgcttgctcgaatgccgcttcatccagtgcatccagtctggttttccctgcgaatgctggtgttaaccacgtgtccagtgttgctagtaacgttgtattggaaaggtctggaagttcaagctccggcatccagtgacgcagtgctacagcgcgtgcctgccactggcgtaggtgttctgtccacgagagcgtatccaggccgagcgtgcgtacggctccggttaatacgtttgcagcctgtactggatcaatgcgtccggcggggcgtacgtcgaggacgatgcggtcgaagcaggattcacgttgcgccaccaaggcgcgtttatctgtttcccagcgtatgacatcgtgttggatgaagcgttcggggaagtcagcgtgcaaccttctctcatccaaaggggcaccacagagcagttggatgtctttgatcccgtgatgtaactcgctcgcgatgatccaaggttcgccatgcagcgcactgttgtcgaacaggcgcatacggcggccgttcgctaatacgtaatacagcgggtcactggagtgacgtgcggcgatgcgttcagggaaagcatgtgtgagtaggttgccgagggtatgtgcttcgatcgcatccggtggtgtggtgtcacagcggatgcgccgtcgccattggtgcgttgcggcgtcgatggctcttagtgtgctgcgtctggtgtcgtgggggagacagctgctgcgtaattcggctaaggcacgccagcgactaatcagcgcgtcgccgctgccgcgaagtggatcgcgcgcatcaagtaatgcggccaaatcgcaggccagcgcctgttcctgtggatcgtgtggggccagcaacatggcggccaaacgtggatgaatgcccagtgccagcatgcgctgacccaggggagtgagggtggaggtgttactgatcgcacccagtcgttgtagcaattcgcgtgcagcgctcaacgcgccagcgggtggtgggtcgatgaagcgcagtgtgctgctgccccaggctgtcagttccaaggccagaccagataattcggtttggatcatttccggtcggcgttgtgcttccagtcgttgtgattgcggccacagccgataggcccagcctggggcgaggcgaccggcacgcccggcgcgctggtcagccgaagcttgcgtgatgctcaccacatctaggcgtgtgaagccggtattcggatcgtaggcaggttcacgtgctaatccgctgtcgatcaccaccgatattcccggtaaggtgattgaggattcagccacattggtggctagcacgatgcgttgccttccatgttgatctggttccagcacacgtgcttgctctttcagcggcagttcaccgtgcagtggcatcacgtgcaattctggggagagtgttttctccagtatggcctgtaacctggcgatctctcgctggccggggaggaaggtcagcacgtcaccttggtgtgtgtccagagcatgctgaatggcgcggcgtgcgtgtgtttcaagtgattcatcacggcgcgcaggaaagtgagtgatcgcaacggggtaggcacgcccttcgctggtcagacgtggtgcatcgagaaattgcgccaagcgttccccttgcagggttgctgacatcacgacaatacgtagatcttcacgtagctgtgtctgcacgtccagtgccaacgctaagccaaggtcgctggccaaatggcgctcatggaattcgtcgaacagcagcgcgccgatgccatccagcagcgggtcatcctggatgatccgggtcaggatgccttccgtcacgacctgaatgcgggtgcgtgcagagactttactctcaaaccggatgtgatagccgacaagcccaccgacctcttcaccgcattggcgtgccatgaacagtgccgcattgcgtgcggcgacccggcgtggttccaaaaggatgatgctgcgtccgttcagccacggcgcatcaagtaaggccagcggtacttgggtggttttgcctgcccctggtggggcttccaaaatcaggcgtggatgattggataagctcgttgttatcgctggtagtagcggatcaattggcagagcgtggtggttcatgcggcacaaagcagatgtggattgtggtgatgcggtgcggcattccctttgtccgttgcatcggaacaacccgcgtagtgatcagaagccgcagagattggtcgatgagtgtgatatgccgagtgcaatcagtattgctgtttctgtttgtcaccaatattgggatttccgcatctccataacaccgatagtgcggtgcattcaatttttgatctcatcgcctcaagtagtgaagataatcaagcgaagcactgatgtgagcaacttcattgtccagtgcagtgctctacggctaccaccgccaatgtgaattgcctccccgagccagcgtgtcccggaaatgcttctggcaggtatgccagggccaggtggagcttgcagtcaacatggcggatgttaacaaagatgcggataggccgacttgacgaaacgagggcgtgctctttggagcgatgttgtgccatagatggcaaccactttcaccttaaactgctaacgaacacgcgcgccagcgattcaatccccgtctggtcgtcactatcgaagcgagcacatgttggactgtccagatccagcacaccgatcagggtgtcgtctttgagtaatggcaccaccagttcagagcgtgaggccgagtcgcaagcgatgtgatcagggaatgtgtccacgtcgtcaatccgttgcgtgcgccgcgtacgtgcagcagtaccacagacacctttgtccagtgggatgcgtatacaagcgggtaatccttgaaatggaccaacgaccaattcacgcccatcgtagaaatagaagccgacccaattcagccctggcagactatgaaagatgagtgctgcaagattagcggcattcgcaatcctgtcggtctcaccatgtatcagtgctttggcctgggcctcaagttgcgcgtactgctctggcttattcccggtgagtatgaaaggagccagcatcggcaaagcctattagagtgtgtgatgggcatgtgtcggcgctttatttttacgcatgtcaatcttcatgcgctataaagcccgaagcaacgattcagatatcgatcctaataaatttaacgagaggtgtgaagccaataatcggcggtgttatttttttatcttgtctccaagcttggagaccccttagggctgctgtttcctccatcaaccttcgctgctactttcgttgtgtaaagaaagtacgttgtaccgtgtcatatgatgcgaacggcatggatgcttcacctgcaggattttgaagtcattgagatgcttctggaatgtgagatttatcactctatccatgctgcctcggtatactgcgcaaatgctaagacgctttatcccgccaatgttgagcttatggttgctcttcgcttctttggctcaggcgaacggaaccgtagacaaaatccagatcaaaggtttggataaaggcgatgacgttgagatgatgaaaaacatcactgtctcgctatcgttgtatagcgtggttggtaaggagcagggcgaattccggctggaatatttgctcagccaagccgagttccagacccgccaagccttggagccctttggctattatgctcccaccattcgcattgatgccccgcgccagaatgatcacatcaccgtggttatttacgtggacaaaggagagccggtccgggtacgtcaggcgcacgttgcgatgacaggagccgctgcgcaggaccattatcttcagcgtgacctggaagatttcaagcctaagcttggcgaaatattcaaccatcccacgtatgaagccagcaaggttcgcatcacccggcgcttggctgagcgaggctatttcgatgccgatttcacccatcgtcgggtcgaggtgacccgtgccgcgcatgcagcagacattgatttgatctgggaaagcgggcgccgctatgacatgggtcccgttcgcttccattacgactatttccacgaagggctatttaatccactggtgtactgggacgaaggtagctatttccacgaaggcaagctggatcgcctgcgtgagtccctgaccaaattggactatttcagcagcattgatatccaacccaagcctgaggaagccgaccctgaaggcaatgttcccgttgatgtcaagctcgaacgtgccaaaagcaaaatctacacggcgggcatcagttatggcagcgaaagtggtgccggtctgcgtgctggtgttgagcggcgctacatgaatgcgcgtggacacaaaatgaatgcacgattggactatgcccagaatctcaaaagcctcaccacggcctatcaaatccccgcgttcaaatggctggatgggtggtacatattcttcgcacgtgcctatgatgagcagaccaagtacatcgacttgcgtaacgtgaagttatcggcggcacgtagcggccaaatcaaccgacatttgaccgccaccgcctcactgaacgcgctacgggggcgttggcgttatagggccgatgacggcaccaatacagtggcttaccagcagtccacgctggtctacccacaattggaagccagctatgttgatgttgacgatgccaccttcccccgcaatgggagcgccgccacagtgctcctgcgtggtggtgccagtgccttgggttccaaaagtaactttacccagcttcatggccaactgcgttggtttcatggattgggggccagcagccgcctcatcttacgtggagaggccggtaccacctgggccagcgatttggtcgcaatgccgccaagcttgcgtttctttgctggaggcgttaatagcattcgtggttacgctttccgcgaggttggtccacgtactgccaaaccggatgccttcgcactcggtgccaaacatgttttcagtgctggcgctgaatttgagtactactacaaaggggggccctttggtggtgccgtgttcgtggatagcggtagtgcgttcaatcgctatccggattggcataccggcgttggtatcggcttgcgttaccgctccccggtaggtccggtacgtgtggatattgcgcgtggcttgaacagccccgattccaagattcaactgtatatcgacattggggccaatctgtgaatgctcctcagcccattggtgccctgcgtcggcgccgtctctggtttggtatagggttgattgcctctggcgtattcctcacactcctggcgttgctgtattggttattgcagaccacctctgggcgtgatgctttgttggctcaggtcgtgactcgtctaccggctgcgaccgcattgacctgggaccgtgctgaaggtgctgtggccgggccgctgaccttacacaacatcgagtttcgctaccaagacatccatttccgtgctgcgcgtttgcgtatggacccagatatctggcgactgctcctacttcggttgcgtcttgatgtgttggaaatgagcaacgccagcctcagcctgggtcagagcgaggaaccgttcaatttcccgagttggcccgatgtgttgccgtcgatcaacgtgcccttggccttgcagatcgataccatcacgattgataactttcgcatttccaaattaaagcaaccactcattcatctgcgccgcatccgcggtgcggtcaacgttgctgatggtgaattaaaaatacagcgccttgccgtggacagtgatcgcggcaatatccgtgccgacggttactaccgcccccgtcaggattactccaccgacttgaccgccactgcggtgttgccgagtgtccgtggccggccgcccgccagttttggtttggtgatccgtggtgacctggatcgcctgcagctcgcgcttgccggacgtgcccctgcaccattgcaggccgatgtggtgctcaacggccgcagcgcccctcgctggacgttcagtgctgccagtgaacactttgaacctggattgttgctccctggtgaactgaccaggactccatcagcgacagcgttggcatttaacatgcaggcccaggggcaaggtggaaaagctgatctcaagggacagttcaaacagggagagcagaagatcgtactgcagccttcgcgcctgcaactggccaatcaaatgttgatggtcgaaccactggtcattgatgcctttggagggcgcaccaacctgcgtggtaaggttgatctgcgcgatcctgctaacacgcgcttccatttttcagtcaacgcccgtggattaagtttcaaaccctctcccgagcctgggaacactcaagtccgagccgtgccggttgttctcgaagaggcgggattgggagtgtccggcacccttcgtgcctgggcagcagtcggccgtgcacggctgacgcgcgatgcacaacaggcgcgtttgatcttcgatgtccggggggatgctgaacatgccaccttcaagcaagtccaagcggctacccctggcggtctgcttgacttcactggcggggtgacctgggcacctgcattgcgttgggacctgaaggccgaattggcgcagttcgatccgggctatttcatccctggttggaatggtcgtgtctccggtcaattgacctctcaaggccgacaacgcactgtatcgtctggcattgaggccatcgtggcagtgccgggactgaacggagaactccggcaacgtcccatgcaagccagcggtcgctttaccttccaagatcatcagggtgagggtgccttccaactcggcatcggtgatagccacatcagtgctaaagggaaagtcggaccgcatttggatttggccgtgcagttacagtcactgcatttgaacgacctattgcccagcaaagaaggcaccctgaaaggcagcctgctgctcagaggccctgcacacactccagatgtgattgtcgatttgaacggcaccagcctgcgttggaatgactatcgtgccaaacagttcgcactgcatggacatttgccgtggcgcggcaacaacggcaagctcaccctgcaagcacaggaacttgagatcggcaccctgcttgatagtgttcgcatccacgccagtggtgcagttgagaatctgaatcttcaggccgatgtacgccatgcaatggccctgcttaccctccatggcggcgtccatcgcgatggtgcgcgctggcgcggcgacctttcacagttgcgtattgaaccagccaaggggccagcgtgggcgctgcgtgcaccggcacagtttgtaatgaacgctcctgttttcaccctgtccgcgacatgtttggatgcacagggcggcggtgccctgtgtctgcatgccgactggccacatgagggactggtactgaagggccaggcgctcccattgacgttggtgcatccctggctacccaagaaaaatggccgctcaatcaacctgcgaggtgcactcacactcgatggtcacctgagaccgcatggcgatgcctgggaaggcagcttccgcgcgtcctccttggaaggaggcattcgcttaggagagccgcgctacgctgacgtgcttggtgtccaagatcgcggtgaattagtccgttatgaccaatttagcgtccaagtcgacctgacctcgcagcatatcgttggcaaactcggcattgggtttcagggtaacggctttgtcgatgccaagttcaataccggctgggatccttatgcgccactgacaggggatctgtatatgaatatgtcgcgcttatattggctggaaatgtttgtccctgacattggcaatccacgtggcttgattgaaggccatgtcagcttgcgcggtacacgtagcgggccgctgctcggtggtgaagcgaccctgcgtgatttcactgctgaatacccctcaatgggactgaacctcagccagggtcaagggcgcttcaccgcacaacccgatggatcggcgcggattctagcctctgtcagatcaggggatggcacattgaatattgatggtggtctctcctggttcggagagaacaatccattgcagctcaatattcgaggccgcaacgtccttgcctacaacaccagcgaactacgtatcgtgtctgacccggatttgcgatttggcttgattaataacaccatgcaactgcaaggtgaggttgcagtgtcggaggctgacatcgatttggagcgtttagaccgtggcgtctcggtgtctgaggatgtcgtcgtgctcgatccggtagacccagagcgtaccgcggtttcaccgctggagatgaacttacgtatcgtccttggcgacaaagtcaatatgagcggctttggtttgaaaggaggcctttccggacagatgcagatccgcgcgcgtcctggccatgagatgaccgctaatggtggcctggatgtgcgcggccgctacaaagcttacggccaggacttgaccattatacgcggtcaacttgtctggagtaacaatattgtttctgatccgcgggtcaacatccgtgcccaacgccgtatagcggatatcactgcagggattgatgtcagtggccgtgcccaatcgccacgtgttcaggtctggtcggatccagtgatgtcgcaatccgaagcgctctcctacttggtgcttggacgtaaactggggactgccagcagcgatgagaaccagcaagtggcttctgccgccgccgcactatcggctggcggtggtctaattgcctcccaacttggcgccaaactcggtctggatgatgccggtatcagccaatccagcactctgggtggctctgtcctggggttcggaaaatatctctcccctaaactctatgtaggctacggtgtttcgatggttggcagtggctccgtgctaacactcaaatacttattaagccgtggctttgatcttgaggtggaatctagcaccgtcgagaccaaaggctcagtgaattggcgtaaggaaaaataactgtcatttctcatttgcgcgggatctcttgccgagcagtgcgtttttcaacggctgatgcagtctcctcattattaaagcccaacagacaggcgaacatattcaaggcttgcagcgcatggcctgtccgataaatcccggctgatcgatcaccaagaaagatgcaccaattgccagtgacatagcactattgccgatgtgctcatgttcaaacaggaacaatgctcatagattggccacaccccatctagcgtgcaacatctgtcaggcaagccccgatctgcctttgcctaatgcactcaacgcatcgctcaagtcgcccacatctcatactcatgatgtcgcgggtgctttaatccggcgctcccattgtcttgtgtgcctgtgttggcagcgtcagagatcaccatgtggcaacacggtgcggaccaacccttgcctcatgatgaggatgcctacaacctgggttgatctgccagtgtgacaggtattcaagtccgcgatccgtaatccgtaatctggcacaacggtgctcagagactgagttggctactgaagcacggaatactgattgttgctacggtctgcgcctgccgcaccccatccggcagaccgtgcgaaccaccatttcatgcgaatgatgttgccgtgcttcatgtgatctcatactgcgacatagtgttccccatgatggagcacttctgaaggagcgcttccgtgtggcaccttagagtgcgctcctctctccatcttttttacagattaaaaatcgccccatgtccacatctctccccatccagacaccaggccaatgtttccgtactgctttgatgaccgagcgccccttgcaagtgatcggtgcaatgaatgcctatcacgcactactggcccaacgtgccggttaccgtgccctctatctctccggaggcggcgtcgctgccggttccctcggcctgccagacttgggaatgaataccctagaagatgtcttgatcgacgtacgccgcatcaccgatgtgtgtgatcttcccttgctcgtggatatagatacgggtttcggccccagcgcactcaatatcgaacggaccatcaagacactgattaaagctggtgctgctgcgtgccacattgaagaccaagtagcggcaaaacggtgcggccatcgtcccggaaaagagatcgtgtccctgagcgacatggcagaccgggtgaaggctgctgccgatgcccgcaccgatgcagccttctttttgattgcccggaccgatgccattcaggccgaaggtgtggaatcggcgattgaacgcgcccaggcctatgttgaggctggcgctgacagtatttttgccgaggctgtctccgatctggagacctaccgacattttgtcgaaagaatccgagtccccgtgcttgccaacatgaccgaattcggtaaaaccccactgttgacccgcgagcaactagaggctgttggagttgcaattcaacttttcccattatcagcattccgtgctgccaacaaagctgctgaaaccgtgtatatggcaatccgccgtgatggccatcaacaggctgtattgccgcacatgcagacccgcgccgaactatacgaacgccttgattaccatgccttcgaacagcgcttggatgccctgtctgcccgcagcacctgatccttacctccttccaatgcgacatcctaatcgcgcaacgccaatctgtcatcgccatagcattacagtgaatactccgcctttcacaccggatagcgacagcacaatgacatgcactattaatgacaatgcccagattaacaatagaaccatcgcgtggttttattttgacgacttaaccgcaagcgcagtgagacatgtttgagaatcggaccccaaaaaatgctgatctcgacattaaaaacaaataaaacaccctcaattcagtatggcaaatagagaaaaactagaagggctgaatcaagctggtgggccgtgctggaatcgaaccagcgaccagcggattaaaagtccgatgctctaccgactgagctaacggcccaaaacaacaacgcagcacatgagattgcgatcgtaaagtgtacagctaagactaaccagcaacataatttttactgtacatagccagtggcggcggcgacaccagcatccacaaattcggccgcacgcagtttacaaccgtcgtaacgcccgcacattggaactcaaagaaagaagacaaacgatgcattccgtagtaagcgggtatgccttacgtaagaaccacgtaccccctgtcactggggacttatgcactacgtaattcactcgttaagcttaaaaccaatgtggcgggcttccgaaagtgtttgaggacccctgaaaatggtccgtagagacgggcatacaaccggccgatagacacatcaatgacacgattggaatgaaccaaaagacgtgttgcggagtgtgttgcggaaggacaacaacacccaagcgaccgtatcgcctcgccattttttgcgtctttgtcaaaaacgttgtcgctgaaaacccctgaaaaatggctttggtgtgctacctctggcaggcagtggtacaactggcgttgccgcgttacgcgcagggcaccgttttataggcatggagttgtctctggggtatagcgacgttgcaaagcagcgtttgcccgatagggtttgtgggtttattcgtgatgtgtatctgtgaaggtctgtagctgagccagtcattcaccgtggctgcggtgatcgcgtccggcttaatagacacgccgtacacgctagcgctgattcggaactttatcgtgctgaagctgggcatcggcggaaagtgatcatgatcagaaaaacgttgcgtcgtatcgcggcctatcttgcctatcttcctaacatgcgactgcttgttgaatacgtgatgatcacggcgttagtagcgctagccgctcatgcggtgctatcgtgggttaatcacgaaaaattaacacaacgcgcgacgcatattcaggagcaagtagccagcatggaacgcactttaaatgagaaagcggcgatgaatgcggaacaagatgccgcaatcgcgccattacttttgttacgcaacagcgactgccgccccgtggcagtaccgaggtgcacccgtgagctttaaacatgaagtagagattgacccatacgtcgaagcgcacgagccgtatccgtttattcttgctgaaaacgtacaaatcgattgttacataaggctgcgcgtaccgcgcacgatagacgcatgtttgtcttcccttgagttaacagggagggatacaacgcacgttgctgtggagttaaaaaaaccacaaggtaaccggcctcttacgttcggctttgtgcttaccgggaaatgccggggcaacactacaatcaccgcgaaaatggaattaacgaacggcgttgttagtaaacgcacctttcatgttgttgtacggtcatggtgtggttaaaaagcgcctcttggaacctgggttgtaggcttcctggcagtaaaaatcgcaacactgcgacgattaaaaacgcgtttcttgaagccttcgactacctcggcggcgttccgacgttagcgaagtgggcctgtgcaaatcgcacgaatttctacacactcgccgcgcgccttattcccaagcaaacccatatcgccagtaaattcgcgctaaacagtgctgatgttgccgagttggatgctgctattgcagtccttgccacccaatcatgccttggcattattgctggcagaaaaaatgcgccgccgctgtactaaccgcgtagccaactatcctccctacgccaaacaacacgcgtttcacgcgatgggtgcgaccatgcgcgagaggctgctcatcaatccggaaaaacggctgtgtgcttgtcatgaggcagcaaatacacctcaccggccggtatcctgatttctgggatggcaaacgttttactagtgctcatcacggtttggccggttctgaaacgggagagttaacgcgtcggcagtgtgcaacgtctcttgcttggccgtgatccgaaaaccgaatgaggcaccggcgcgattcctggcgcgtgcattggatgccatgacctgggcgcgtggtgtgcctgagctggtcgataccgtataggtacgccattgttctggcgtgcgtcgttccgtctcgctcacatctttcgaacagggaggtgaaaaatggcaggccgatccagtcgattggatgtggtttgacgagcaaccgcccgaagatgtgtacttcgagggcatcacccgcactaatcgcaccttttggctggtgtgtatgacgtttacgccgctaaaaagcatatcaaccgtggtgtggcgctttctgctggaaaacgttccggatcgggcagatatgcaaatgagcattgaagatgccgaacactatttggtcgaagactgcgcgcgtatcactgcaagctacccaccgtatgagcgcgaagcacgtactcaaggcgttccagcattagggagcggtcgcgtattccccatcgcgggagaaaaaatcggcgttgcccggaaaaaaatttgaagaaggtaagcaacgcgctccgaatcgccttatcggctaaaccatcaacgcatcagatgctgcacagcgtgacatgtctctacgcgcacgcattgacgccgatccgaaacacttttgttaggctcaaaacggcaggtgtcccagccgcacacgctgcggctgaagccgaagcgtgtgctgatgtgttggaaatgaatttgcaaaaggtcaccgagtccgcatccagaaacgacaagtgactggcgcgtcttggggcgaacatcgtgaaaggtttcgcagaggtagaacaacgtttaggcaacgtagaacaacgctatcacacagacacacagatagaaaaaggcttcgtacaggcagatcaacgtttcactgaaatacaaaggtgaaatgctgttacttcaatggatgcttggtgtgagtgttgtctgcatcgctgcgctcatcatcaaagcgttgttctgagagtcatgccggcacctcatccacgctctgcaagacgtgtcggtgccgccgtgtacgctagcggtgccgttctaatgaacgaccgcagacgcgctgcagtgattggccacgacgtatctatgtactgcaaggtgcggcgtggcttgtatgtgtggcggttgtaaaagatgcctactgcggcacaccaagccgtaatggagctgaaaaatgcgctacgcagggacgttgcatcatgttcgtttgtctgctcagggtgcttgctgtgtacagcatcgggtcatgtgcgcaacgctctcatcaccatcacccatgatgttgtcctttgatggctcccaaagcggggccgttatcaccccatcgacactcgcgctatgtagactacacagcagccgcagtgccttcccctatgcacaaccgctatcgcaaacccttgccggggacaccgttccattactacgatgctcgggccgccattgatgggttgtgccccggcgcttacgcggcgttgccatatgtcgctcgcgtgtatgcagaaaacgtgttgcgccgcgccgcgccggatcagtggcctgcgtatctgggccagctcattgggcggcgctgtgataccgatatcccgtggtttccagcgcgtatcgtctgccatgacatccttggcctgacagcattggttgatttggctggattgcgtgatgcgattgcggcccagggaggggatgcctcccaggtcaaccccacggttccggtacaactgattgttgaccactcattggcggtggaatacggcggcagcgatccggaggcggttgccaaaaaccgtgcgattgaagcacgccgcaacgcggatcgatttcattttatcgagtggacccgacacgctttcgaaaatgtcacggtgattccgccggggtacggcatcatgcaccaaatcaacctggaggcactgtcgcctgtcgtcgcagtccaggatggcgtggtgttcccagatacctgtatcggtacagatagccataccccgcatgtgaatgctctggggtgtggttgccattggtgttgggggcttggaggcggagagtgtgatgctgggccgtgcggtgtggctgcgctgtccagagagtgtgggtgtggagttacacggacgcccgcgccccgggatcaccgcaacggatattgtgctggcgctgacagcgtttttacgccaagcgcgtgtggtgggtgcgtctctggaattccgtggcgaaggcgtcgctgcgctcaccgtgggtgaccgtgccacgattgccaacatggctccggaatatggcgcaactgcggcgttgttctttattgatgcgcagaccgtggagtatttacggctgaccggacgcgacaaggcgcaggtggcgttggtcgatacctacgccaaacaggccggactgtgggccgatgcgcttgagggggcacagtacgtgcgcctactgcatttcgacctctccagcgtcgcacgcaccatggctggcccgtccagcccacatcaccaattgcccacatccgcgttgacggagcgcggcattgctggcggcttggcgcaagcgcgggcagaggaagccgccgggcatctgccggatggcgcagtcatcattgcggcaatcacctcatgcaccaatacctctaacccgcgtaacctcatcgctgccggtttattggcgcgtaacgctcatgcccgcggactacgctctaaaccttgggtcaaaacctccttagcgccgggttcccaagcggtgccattgtatttggaggcggccggactgttgcccgcgctacagcagcttggctttggcgtcgtcggttttgcttgcaccacctgcaatggcatgagtggtgcactcgatccgctgatccagcacgccatcatggcgcgtcatgtgcacaccgtggccgtgttgtcggggaaccgcaacttcgacggacgcattcatcctgatgctacacaagcgttcttggcttcgccgcctctagtgattgcgtatgcaatcgctggcaccatccgtttcgatattgaacgggatgtgctcggtcatgatgccgatggtaccccggtgatgctcaaagatctttggcccagtgatgccgacattgatgcattggtgcgtcgcagcgttcacccggagcaattccgtcgtgtgtacgcgccgctgttgcaagcgtctagacagcggcgtgaatgcgtcccgccgttgtacgcatggcacccccggagtacgtacatccgtcggcccccttattgggaagggggcttagccggtgcgcgcaccttgcgtggattacggccgttggcggtgttgggcgataacatcaccaccgatcatctgtctccgtcgaatgccatcctgcccaatagtgcggctggagagtatctggcccgtatgggggtgccccaagaggactttaatagttatgcaacccaccgtggcgaccatttgaccgcgcagcgcgccaccttcgccaatccgatgctgttaaacgagctggtgcgtgatgctgatggcaaggtgcgtcaagggtcgctgacccggcttgagccggatggcaccgtgatgcggatgtgggaagccatcgaaatctacatgcagcgtagccaacctttgatcatcattgccggtgcggattatgggcagggatcctcccgtgactgggcggccaagggcgtgcgtctggctggcgtggaggcgattgtggccgaagggttcgagcgtatccaccgcaccaatgtcattggcatgggcgtgttaccgctgacgtttcaacctggtaccacccgcgtcacgttgcgcattgatggcacggaattgttcgatgtatgcggcgtgccgagtgtgggtgcggtgctgatcctgcgtatccagcgccgtgatggcagcgttgcggaagtgccggtcacatgtcggctcgataccgctgaggagctgtcaatctatgtggccggtggcgtgttgcagcgtgttgcgcagcagatgcttgttaccacctcaggcacgtcacaacgcgtttgatatgagcggtgtcctgttgttgttcactgcgtaggaaatccctctgtgatatgacagcgtcatggtgcttggtgtgtctatgatttaccgcgtctcccatgccgccgctgtcttatgtggaggtctcaatgccggatgagatccccctggacagcgcgtccatgtgggccatgaggatgcagtatgtgaggtgccctggcgcctcttctgtgtttgagtggcgatgccgctatcgttgtgattggcaggagtccttctcaatgatgtgaatgtggatagtcctacagagaccggcttgagtgggcactgtcttcctctcttttccctaccgctttcgaggtcttgtcatgctacctctccctcaatgccgtatccctgcgacgtatctacgtggcggtaccagcaaaggtgtgttctttcgcttggaggagttgcctccagcctgccgtgtgccaggccctgcgcgtgatgccttgttactgcgcgtcatcggcagcccagatccctatgggaagcagatcgacggaatgggaggcggcagctcaagtaccagtaaagtggtgatcatcgcgccgagtgcctatcccaatcacgatgtggattatttgtttggtcaagttgcgattgagcgtgcctgtgtcgattggacaggaaattgcggcaatttgtccgccgcagtggggccatttgccattgctgccggtattgtcgatccggcacgggtgccacatcgcgggatatgcagtgtgcggatttggcaagccaatatcggtaaaaccatcgttgcacatgtgccgatcattgatggacaggtgcaggagagtggcgatttcatgatggagggggctgctttcccgggggctgaagtgcgcttggagtttttcaatcctgcggatgtgggcggagatcgcgcgatgtttccgacggggcacctgatcgatacgttggaggtgccaggattggggccgattgaggccaccttgatcaatgcggggataccgatgctttgtgtggatgcccatgccctgggctacaccggtaccgagctacaagaggcgatcaatggtgatccgcatgcgttggtttgtctggagacgttacgcgcctatggggcgttgcgtatgggagtgatcggacatttagaagacatggtccagcatcagcacacccctaaacttgcttttgttgcaccgcctgccgactacgtcgcctccggtggtcggcacgtacatgccacagaaattgatgtcctggtgcgggcaatgtccatgggccggttgcaccacgcgatgatgggtaccgccgccgtggcgctggggacggcggcggcaatccccggcacgctggtcaatcgtgcggctggtggcgggctgcgtcgtgtggtccgctttggccatccctccggcaccttgcaagttggggccgaagtacatcaagtggatgggcaatggtctgtctccaacgtgcggatgagccgcagtgcccgtgtgctgatggaaggttgggtgcgtgtgccggcagagagtgtgcagaacatggattgagttttgatcccggtcgcgtgtgttgctgtcctggggtgctgttaggtgtctctgtgcctgtcgtgtgttcgccgctatccccttggggtggctcgacatatttcctagtgattcccatacggcccgccaagtgcaagagccgatgctcaatgggggatcgcggggggatcgcgctgtgcagtgtctccaggtcaaccttgacgttccatcacctgaggcttcaccgatgccatgttcagaacggcagtgcccgtgcctgcctgatcaccgatgctgatttctctgctcttccgacttgctggttatgcggtgtgattcagtgtcccccggggtatttcagtcaagcgccgagcaaaacgcagctgtggttttaatcggctttgcttggtgcgggcgtgtcgtgcggtgtattcgtttcttcggagtgcatctcacctggcattgcatctaccgtagagcgctcacggcctccgctgtgaaacataccgctagagacaatgcaggcaaggaaaagaccaaacattgttaggcggaaaaatgtttggctcccaggcgaaaagaaagcataaaccacgaagtaataaataaggaatgcgaaaacagaaaacatatttatctctctattgcctgatgacctgtcaggtctctgtggaagcgattacaaaggggcttggccaattcagcgcggtaatagccgcgtattttttatacgtgtttgatataccccgtaaaagttaggagtgtttgttgagtggccatgtgatgagcagtggtctcaaggtgtctgctatagagtgggggagggctgcggtgtatttttactctccgagtgagttgcacttggagttgtgaggtactgtgaaacgtaaattaaaatactagtattaagggaaatatggagaaagataatcacaacaataagaaagatgatagcaaatttagcagcgcgtaatcttaattcgatatgcgctttgattgctttatacgcagttgtataaatgattaatatcagtgaaatgaataaatctatgattacctcaatgagttcggagagtttcatgcaatcggtgtttccaaagcattagagggaggtaagtgatattttttagttcagcgcgctcatgtccgctcatggttttaaatggggatggctgatataaatcgcatcagaagcagcgcttgttgggtgagcatgtgatgagcagtggttttaaggtgtctaacctggggaagtgctggtgtggggtatattgtttgcctcccaatgaatcagaggtacatttactggaaggctcggtcacctttcgcaaaatagaatgccacaaataaaatgataaggataataataaaagggatggctatgtcgcgtgcgtcatattttctttggagtagtacgaaacaggcgatggctaaactgatgagtaattcaacgattcttcttgagtatcccgtttgaggtggattactttcttccgcgtgaattgcatttggaggctggtgcgctgtggagaggcccctgcgtccgcagtgaaacatagcgccgcaacagataatcacaataataaaaaagatgatccagttgtgtaatttggattggttgcgttctaaggttctgctgattaaattaagaatgaatatgaataaatcaatcattgctttaataaatgttgaaaatgtcatgcaatcggtgtttccaaagcattagagggaggtaagtgatatttttttagttcagcgcgctcatgtccgctcatggttttaaatggggatggctgatataaatcgcatcagaagcagcgcttgttgggtgagcatgtgatgagcagtggttttaaggtgtctaacctggggaagtgctggtgtggggtatattgtttgcctcccaatgaatcagaggtacatttactggaaggctgtgtcacctttcgcaaaatagaatgccacaaataaaatgataagaataataataaaagggatggccatatcgcgcgcgtcatattttctttcgagtattgagaaacaggtcatggctaaactgatgagtaattcaacaattcttcttgagtattccatggaatatgtgtcctaaaaaatttagatgggtgtgcaagtcgtttgagtgatgcttttccagttcatcgcggtagtatccacgcattttttaatgtctctctgatataccccgtagaagcagtagcgtttgttgagtgaccacgtgatgagcagtgctctcaaggtgtctgggctgcagaggtggcggggtaggctgtattgtttgtctccgcgtgaattgcacttggaggttggtgtgctgtggagcggtcccggcgtccaaagtgaaacatagcgccccaacagataaacgcaataaccaaaaagatgatcatgtagcgtactctgcattggtcgcgtgaatatgcataagtgattgcatcaaggatcaatatgcataaatcaatcattgctttaataaatgttgagaatgtcatgtaatcggtgtttccaaagtatttagatgggtgtgggcgtcatggagtgatatttgaataattcagtagtatccacgcattttttaatatgtctctgatataccccgtaaaagtgggggggtattgagtggccatgtgataagcagtggtctgaaggtatcttgcctggagaggtgggcttgtattgtttgtctccgagtgaatcacactcggagacaaatcaatgatgagttgctccctgctttcggtgctggcaaagagagcgacgtccatgagcatgctagcaagggggagtctgcttagatccctgcggaagccatttcaatcgggcttcgccagtttgccgcagcaacgtatatacatgattgatagcgttggttctgcgatattttataattttcatgaataatttgcttgaaatatgcctttacaagtctccatgcgtctttcaactgcggttttgtaaaagggtttagtatttgctgaggtacgaagctataggctattgagcatttcaaaatttctcccgtcaccgtggctagaatattcccaacggcggcgttcatatcccaatagttgacgatccagggttgccagatggaggcggccacttgacgcaatgtttcctgttcttgcggagagggttcatttgacatggtgcgacgcttcatcaaggagcgggggtccccggcgctatgttctttggcgtgcgatatcaccgccgagggcggtaaaaaccgctttgtccacacttggatggcggggtggatttgggaagcgttaacaccaaaatggaatatttggcgtccgttgtaataagccgcatacactctgcctgtttccccagggtagtacacgaaggcggcggcttgtttgtcgggttgtcctgtttccagccatctaaaaagatgccgccatctttgaggtgagccggattggcgaccatttcaaaattgtttttgaatgtgtcgtaatgttctccaagaatttgccttaaatcattttcaatgcctgcttcaaggataatttcttgaaagagtgtcggttgtttcggtttggcggtgttggcccatgctggggcgatgatcaaacacagtaatagcgcgtaaatgccttttaaaccactcttgatattcctcattaacgatttctctccatgtgaattgaaagggtgcttgccgctcaatggtcatcaataggagacaagcactccagttgcggcctaactcaagtgggccgttgttgcgagttgttcggtcagtggcggggtgttcaaagacggggcgacaggggcagattgggtgggatggccgtatcgggagtgttggattgtccagggggcatgtgctctgtggaggtagacgttgccagtgcagtgtgtgggcgcccagatgtgcggggcagcatgctgcgggccggttttagggtccgctgttcaatcagcaggtaaaaggaggcattgataatcgcttgccggattggcggggaagaggtggaagcgaatggcgtgtactgcgcgagacagcacagtatcggtgcgtgtgattgatgtgatgaaatttctatggcggaggtgggggcaggctgtggtctgcgtagcgagtggtaatgattttagattaagtttttttattctcagcgttcaatgaagtattcaatggtagattcattgtgtgttagtatacataacgattgtgaaataggtaggtatgatgaaggacgcaatgagcatcattaagaagaaaacaatcagaatactgtttcctcaatggcaaggtggaaatcaggagctatatagtttgggtgcacgtcttctggcttggttggcgccggaaacagaggctcctatgtttgaggtgaatgtgcctgagtttaaaaaagaaacgcccgaaccggagagaggggttatctacaggcagcaattattcaagcagtatgatgaagcttatcgactgttggagcgggaagatccagattatgtggtgatttttggtggtgattgcctggtggatttggcgccttttgcttggttgaatgagaaacatcatggtcagttgggtgtgttatggattgatgctcatcctgatataaaaacaccgcaggattctatgaatggtcacacgatggttctgggaagtttgctgggtgaaggtgataacgaatttgtcgcaaaggtgaaagttccgttgaagccgtccagggtgatgtttgcagggttgattgaaacggggttgacggagcaggagagtgaggtaattcatcgccttggactcaatgtggccaaaccggaggtgttatttgacaacagccagacggtgattgattgggtctgtaaggaaaaaatcgagaagttggtgattcatttcgatctggacgttcttcatcctgatgtatttcgctcgttgttatttgctgaaccggagccggaattcgattggcgggcaacttacccggttgggcaattgcgtttggcacaggtgatcaggttgattcgcgatgttgccgctgaaacggagttggtggctattggcataactgagcatcttccttgggatgtttggcacttgaaggagtctttaagtaaggttccattactgaatcggtaagagcaaaacgatcagggataaaagttggtgtcattgtctatcggtaccggcttttgtcaggcaccttaggtattaggtacttagattgcttagatagcgtgcaggttatggtttttcgctggtttatcacagagtggcgataacctcccagtcaccccttgatgtgactttgacccacaaagaggtgccggcgtgctgcttgggtcaggttgagtgatgcggtgtggtgtgtttctcgtggtttggggcagcggtgttgtattcgacttaggggatgtgcgttgcgagcgatcgacggagtgggtcgctgtaaacgcggccatgtgccgtgatgtgtcatgggtgtttgtgaccggcaatgcttgagtggatggggccaagctggtgtgctggatcgggtgtgatttgccgattttgtgttttccggtgtttacgacatgcatacgtgatctgtgtcgctatactgcgggtgactatctgtggagtactcctaaatgagagaccgtgttgcaatgatgttgcgtccgttggtccgcggttggatcccacgtgctgtgttgttgttgacggttgctttttcattcggttgtaaccgcaaccacaacggccagttgccgcagagcagtggtgagccggttgctgtggcaaaagagccggtcaaggggttcgtcctagtacgcgcttatccggatcagcatgatggtgaattggcgctggcactggaattctcacagccgttggcagcgacgcaggaattcgacacgttggtccgtttagagcaggacagcgggaatcatgatggggggtggtcgctgtccgatgacgccaagacgctccgttatccttatgttgaggcagacaagcactatacggtgttgatctccgcgggtttgcttgctgcgacggggagccgtctgggtaaacctcgcaaggagccggtgtataccggcgaactggatccagtggttggctttgcttcccggggaagcattcttccggcgcgcggcagccgtggtgtgccggttgtttcggttaacgttcctgaggtggatgttgagtttatgcgtgtgcgcgaaaaggcgttaccggcgtttctggctcggtaccataaggccgggcagcgtagtagttgggagttgagcaatcaaggcaattccaggaagcgtttatcggagttggctgatcccgtctacgtgacccgcttcgtactcgatggtaagaaaaacgaacgcgcgttgacctatctgccgatccagagcatcagggagctgcgggagccggggttgtatttcgccgtgatgaagccgactggcagtttcagcgatgcgtttgaaacggcttttttcagtgtcagcaatattggtctgcacacccgtgcttacaaagataagttgtttgtgcataccgcgtcgttgcgcagcggaaatccgtataagcaggttgacctcctcgttctcgacgccaaaggtgagaccgtgttgcagggcgccaccgatgataatggcaatgcgttgctcaattacaccttgaatgctggccatgtgctggtatcgcgcaatggccgcgacatatcgattcttccatttaatcagccggcgttggacctgagcgagtttgcggtcgctgggcgtgagaacccgtggtttgatgtgtttgcttggtccggacgtgatttgtaccgtccgggggaaacgctgcgtatatcggcgttgttgcgtgatcgtgatggcaagccagtgaagccgcagcccgtgttcctacgtttgaagcaaccggatggtaaaaccttccgggagaccaggttgcagcctgccgagcagggatatctggagttcacgcagaagattccgtccgatgctcccaccgggcgttggcgggttgagttccgtaccgatccggccagcaaggaggcggtacaggggttggctgtgcgggttgaggagtttcttccagaacggatgaagttggagctgtccagtgcgcagccggtgctgcgggcaaaggcaccgttcacgttgacggctgatgcggcgtatttgtatggcgcaccggcggcaggtaatcgttttactgcaaatcttgccgtcgcggttgaacagcatccgttggacaacatgcccggctggtttttcggcgatgccacgttgcaactgccgcgtggggcgaaggagaccattgatatcacgcttggcgcggatggccatctggtccatgacattgtgctgcctgaagaggccaagccggtgagtccaatggccgtggttgtttcagggagcgtctacgagagcggggggcgccccgtcactcggagcctcaagcgggtgttgtggccggcggatgcattggtaggggtgcgtccactttttgatgttgcctcgggggctgatgcgaacggcatggcgcgctttgaactgacccgggttggtgttgacggtaaaccgcaatccgctaaagggctgaaggcgacgctggtccgtgagttgcgtgactatcattggcgttacagcgatggccgctgggattatgactttacgcggcgtttcgagaataaggagacgcggacggtggacatttccacgagtcacaccaccacgttggcgttgcccgtggagtggggggattatcggttggaggtattcgatccggtgaccggtttgaccatgcgttatccattccgtgcaggctggagttggggagacgataaccgcggtttggatgcgcgtccggacaaggtcaaattggccttggataaaaccagttaccgtgctggtgatactttgaaggtgaccatcactccaccgcacccgggcaaggggctgttgttggtggagagtgacaagcctttgtatgtgcaagcgatcgacgccaatccgagcactacccttgagattccggtgactgctgattgggagcgtcatgatgtttacgtcactgcattagtgttccgtggcggcagcgcttcgaacaacaccactccggcacgcgcggttggggaggtttatgttccgatgcagcgcaaggaccggcgtgtggcggttggtcttgtggtgcctaagcagatgcgtccggcacaatcgttgccggtgactgtcagcgtaccggagttggccggtaaacaggcgcatgtgacgatttctgcggtggatgcaggcatccttaatattaccggcttcccggtgccggatgctgcggcgcatttttttgcccaacgccgtttgagtgtggatgcgtacgatatttatgggcgggtgattgaaagtttcgagggcggtaccggcaggctgaagtttggtggtgatatggcattgccgccattgccgcaggcaaagcgtccgacggcgcggtcacagacggttgacctattttccggtgcggtcaagctggatgcgaaagggaatgcgcatatccaactgccggtgcctgacttcaatggtgctttgcgtgtgtcggcgttggtgtatagcgacactcgttatggtcagcgcgatgctgagacggtggtgcgtgcgcccattctggccgaagccagcatgccgcgggtgatggcaccgggtgatcgcagtacggtgacagtggatgtgcagaatttcacgggtaagcagggcaaatttgcggtgaaggtcgagggtgtcggcccgttggcggtggctgaggctggccgcagtgtcacgcttgggattgatggcaagaccacgcttaattttccgttgcgtgcgttggagggaaatagcgtggcgcaagtgcgggtgcgggtggagggtaatggctccaaggcggagcgccactatgatttgccggtgcgtgcggcttggccacagggattgcgcacgcaggcgcatgtgttgaatgtcctggcaccgattgcgtttgatccggcgttggccaaggggctgatgcctgattcggtcaatgcgcgcttgtctgtcagtgcattggcaccgatcccgtttgccagtgtgttgcagggggtgtttgagtatccgtatggctgtgctgagcagacggccagtaagggctatgctgcgctgtggttggatgatgccactatcaagtcgctaggcattcatggggtgactccagcacagcgcctggaacgcttggaaggtgctttggggcgattggcgtcgttgcagacgatgaatggccatttctcaatgtgtggggggaacagtgatgtcaatccggtgttgacaccttacatcgctggtttcttgctggatgctaaggatgctggttttgctgtgtccgatgcagtactccagaaggcgttaaaccggttgagtgaggatctgctgtctggcgctcatctgttttacggtaatgatcaaagtgaggcgctgatgttcgcccaccaggcgtggtcgggttatgtgttggcacgggtcaatcgcgctccgttggggacgttgcgtacgctgtatgacaatgagcgtggtaaggcagtgagcggtctgtcgttggtgcatttgggtgttgctctgagtttgcagggtgaccgcaagcgtggcgaagcggccattgaagcgggctttgccaaatctgagggtggtcggccggaggtgttcggtgattacggcagcgtgattcgtgataatgcgttgatgattgccttggtgcgtgcgcatggtttggcgaagccggcctatgaggcgcgtgtgatggccttaggacgtgatctggaagcgcgtcgccgtagtggctggttgtggttgagcactcaggagcaggtggcgctagcgcaactgggcagggcgttgttggtcgatcagaagaagcaggtgtccggaacgttgtacgtgggcaagcagcgcgaggagattgctgcaagtaggctgattggtcggagttttgatgcggctgctttggcgcgtggggtgcgttttgtaccgcaaggggatgtgccactgtacgccagttttgaggttgcgggtatcccgcgtcaagcgccggtatcggatgatagccaactgttagtggtgcgccgttggtacaccgtcgacggcaagccgtggacaccggggccattgaaggaggggcaggcgttgatcgtgcgggtgagtgtcacgtcgaagcagaatatgccggatgcgttgttgaccgatctgttaccggcggggctggagatcgataatttcaatcttggtgagaccaggcaatgggcagatgtgacggtggatgggatcgcgctcagtgagcgtgccaatgctgccgatatcaagcatgaggagttccgcgatgatcgttatgtcgcaatgttgcagttgacgggcggcaggacggccaatctcttctatttggttcgggcggtgacgccaggcacttacaaggtgccgccttctctggtggaggatatgtaccgaccggcgttgcgtggtacagggcgtgttgctcctgcaacggtcacggttgtgcagccttaggggcagtgtgtggggcgggatttggaatttttctcgaggtgtctttaaaacattcagggggctggcccaacagtaatcggatgttgggccagctagcgtcagacgttaacgcaggtgtaccttcagttcttcgcttgcctggtgtaacgcagcgcgagtggcaggtaggtcggcgagtacattgaggagtccgaagtcgtgaatcatgccgttgtagcgtgtgacgacgacgtccaccccggctccgtcgagtttgcgtccataggcttcgccttcgtcacggagcacatctttctcagcagtttggatcagagtgggtggcaggcctttcaattgttcggatgtggctagcagcggtgatgcgtagatgtcctggcgctgtttggaatcagtggtataggcatcccagaaccatttcatcatgttttttgtaaggaagtggccgtttgcgaattcgttgtaagaggtgttctcaaagttggtatcggtgactggccagaacagcacttgtgcgcgtagcgctggtgtgcctttttctttggccatctgtgctaccacggtggccatattgccgcccacgctgtttcccacgatggcgaggcgttgaccgtcgacattgatctgcgcgccgtgttcggctacccactgggttgctgcgtagatttcattgatagccactgggtagcgtgcttccggggacggggtgtagtttacgaagatggctactgcgccagaatcagataccagatcacgtacaaggcgttcgtgggtttggaagtctccaagaacccagccgccgccgtggacgaagatgaagccaggcaggatgcctttgacgccggctggacgaacgatgttcaacacaatctgcttgccatcaatggtgatggttttgtcgctcacgtcggctggtggcagtttggctcccttttgtgcgtttacaagcacttggcgtgcgttagcaggcgacagggtttcaatcggtgctccccctcccttcgctaagtcttcgaggaaggcttgggtgcggtgttcgacaccggggctgccggcagcttggcatgaggtggatgccagtgccaagatggaagcggtggctagtttgcgggtgaatttcatagggttgatcctcggttataggtgggtacatttgggacattgaaacgatgttcaaacgcacgttgatgttgttgtgagtgatgttgaagtacggtcgggtactgcgagttttggtgtgatgagtgacatctttgtgatgtgaggggtttggttggattcctttggtaagatgaattctatgactcaattaagtatttttagtcgctcaaagtacttaaatattgataatgagtatcgaagtggcgggtacatgtactgatcgtctggaggcgttgctgaatcactttcctgttcgcgcgcggatgttccattcgggtgccttgtgcggcatcgcggatttttccgttccggctgaaggtggtcaggtacatctgctcagaagtggggcgatggatgtcattcatccaggtagggagttgcttcaggtgagtgttcccagtttgttgttctatccgcgccccatgtcccgccgctttgttgccgacgcgcaatgtggcgctgacttggtttgtgcgcaacttgatttcgaaggcgggagtgcgaatcaagtggcgggggcgttaccagatgtcgtctgtttacccttggagaacattgatggtgccgctcaggtgctggagctgctgtttgatgaagcgtttggcgatcattgcggtcgccgtgtcttgattgatcggttgttcgaggtggtgttgattcagatgttgcgacatctgatggaaacgggcggggtggccggtggcatgttggccggtttgtcgcatcccaagctgcgcaaggtgttggttgccatgcacgagcagccggaacggggatggtcactggaggcgttggccgatgttgcggggatgtctcgcagtgtattggctggcacttttcgtcgtgttgtcggttgtacgcctggtgcctatctgcaaggttggcgcgtcaagctaacccaacatgctttacgtcaaggccggcagttaaagacgattgctgttgaggttggttacggtagtgaagctgcattgtcccgtgcattcaaagcggaatgcggtatgactccccgtgagtggcagcagaggcgggatgaggactgaagtcagcaagtgtgacaggagtttttgcgcgtagcgtgtcggcaggtatgcactatcagtttagatagcttagataacgatgagttggtttttttcatctaatcaaggacgccacactatatagagtatggcgtctgcgttactcacttgctgttggtcggtttgaccttgttatcagaactttacattgtccatatcgaatgaaaatggacctacgatctgagtctgtctttgttcatccaagtaatttggattcttaggttgagtttgttgatcggattgttcctgagaggaaccaccaacgatgaagtgcaactcagtttcggccagctcacgtattggtgcagatggaaattcacgtgcgagtcctttggtcattgctttagtttgcattgaaaacctcacagtgttacggaacggaagggatgccgatctgctatagaggggcaactcttagttttccaggggaactattcgttctatgtgaattttcagatgtcatttagctattgggattgttgtttcatcactgctgtgaactcggtctattgtttgatttcattggaatcatctttttctgtaatggcatgggtgaatcacatgtcattgtatccatcactcagtgtgagttgcttattgttttggctgctttcatcagatgtggcagtgttttgcgatcaactttagtgatgcgtgacttttacgtgattttggtagtcgttcgctcagggaaatatttgaattggtttggtgtcaaagatggttggtggcttgattgtgttgcagttcccgatccgctgtttgcatcgggtttatggtgaatgattgggcatatcatatttcgttcatatgattgatatgggtgattaaagtgcaaaggatggtgatatggcttcagaactccccgtagtcgaaagcgacaggcggttgatttggatcgatttggaaatgacggggctggatacccatcgagattcgatcattgagatcgctacggtggtgacggatgctcagctcaatgtgcttgcagagggtcctgagtttgccatcagtcatcctttgcagatgttggaagcaatggatgagtggaaccgcaatcagcaccgccattccgggttgtggcagcgtgtgcttaatagtgaaattcagcatgctcaggctgaagcaagcacgattgcttttttacagcaatgggtcaaaaccggggcttcaccgatgtgtggtaattcgatttgtcaggatcgacgtttcttgcatcggcagatgccgtgtttggagcgctatttccattaccgtaatctggatgtgtccacgctgaaggaattggctgggtgttgggcccccagtatcctggatggtgtggtcaaaacgtccagtcacacggcgctgagcgatatctatgattcaatcgcggaattgcgtcactaccggaaatcaatggggacattcgctggtttaccagtagtctgacagtccgaggagcggctggttcgctggcctgagcatctgcgcgaggggagggcagatgcatggacgttagagccattgttgaggttgaaaggagcagcggcggagcgtgttggttgtgtttaagtggccttgtgaggttgttgggacatgagtgacacccacacttgggtgggtgtactttcaatgttggcaggccagcggtggccctttgtaggcgttagctttcgtctgccacgtcaggcaatagcagtgaggcgattttgcggttgttggtgtcatgatggtagagatgtaggtcacgttgtggataggggatgttcaacccattttcaggtaattgattgtgaatttgttcaaggagctcgctcttggcagggttgaagttgtcgttctgagtgtaggctaatagcagaaggtctacgctactttctccaaggttgttgacatacaccaagggtgcggggtcatccaatatttttggattttcgcgggcaatttttagcagtagttcctgtgcctgctttaagttgtcttgatagctgacaccgacagtaatttcaatccgacgggtcggcagggtgctgtagttgataataggtactgtggtgatcgtgctgtttggtaaggtgatgatgcgctgatcgaaggtacgcagccgggtttggaatatccggatttcatcaatgatgccttcttggccggcgatgacaacgtggtcaccactacggactgggcctaatacgatgagcatcactcctgctgcgatgttggagagtgaatctttcagtgcgaggccaaccgctaagccggttgcaccgaccactgcggctaaggatgttgctggaacaccaaggcgttgcaggacgctgacagagacaacgatcaaaagcagcgcgtatgcgatattccgcaggaagttggccagtgtgatttcaacgtgcgcgcggatcaggatgcgatgcagtccgttgctcaggcgtttgcttaaccatacaccaaggatggcgatggcggcggcggcggtcagattcatgaggatgtggatccagtcgatccgtgtccagtcaaatctgccgtgtatcgtcgtcactgttgcaggggatacgatgtttgatagtagttttgtccagtccatttagtgcaccgtttttagttttgccaagcgtagccaagtatcgacgacggtatctgggttcagtgacagggattctatgccttcttgcatcagccattcggccaagtctggatgatcggacgggccttggccacagattccaatatatttgcctttggagcgtgctgcttttattgccattgacagtagttttttgacggctggattgcgctcgtcaaatagaggggcgacgatggaggaatcgcggtccagacctagggaaagttgggtgagatcgttggagccgattgagaagccgtcgaagatatccaggaattcatcagccagcagtgcgttggagggcacttcgcacatcatgatcacttttaaaccattttctccctgttttaagccattttgtcgtagtacgtcgatcactttgcgaccttcttccaaagtgcgtacaaatggaatcatcacccagaggttgtctagacccatctcgttacggacttttagtactgctttgcactctaatgcgaaggcatcgctgaatgaagggtcgacgtaacggctggcaccgcggaagccgagcatcgggttttcttcttgtggctcatagtgctggccaccgatcaggtgtgcgtattcgttggatttgaagtccgacaggcgcacgatgaccgtatggggtgcgactgaggcggtcagggtcgcaataccttcggcgaggcggttgacgtagaagctgactggatcaggataaccggcaatcttggcgtcaatcttctgtttcgtgtcagcatcttgtttgtggtattccagaagtgcttttgggtggacgccgatgtgtgcggcgatgatcatttccaggcgtgccaagccgataccggcattcgggagttgcccaaagtcgaacgcacgttccggattggcaacattcatcatgattttcagcggcgctggtggcatgtggccgaggtctgttgtggtgcgttcgaacggtagtttcccggcgtagatatagccggtgtcaccttcggcgcagcttaccgtgatgggttggccgtcttgaatgattgatagcgcattgccggtgccaaccactgcgggcactcccagctcacgggcgataatcgcggcgtggcaggtacgtccgccgcgattggtgacaatcgcgctggcgcgtttcatgactggctcccagtctgggtcggtcatgtctgcaaccaggacatcgccgggttgcatgtggtgcatgtcctcaagtgagtgcactacacgggagatgccgctgccgatcttctggccaatggcacgtccctctgtcaatatttcgccgcgttgttgcaatgcaaagcgttcaatctgggtggtgtgactgcgtgatttcactgtctcgggacgtgcctgcacaataaataacttgccgctgaccccatctttggcccactcaatgtccatcgggcggccgtagtgctcctcaatgatcagtgcttgctttgccaactcctgtacgtcagcgtcgctgatggcgaagcagtgacgtaattcagttggggtatcttcgattttgacgcgttctcctggggagtctgaatagaccatgcgcaccagtttgctgccgagtgtgcggcgcaggatggcaggtttgccagctttgagcgtctttttatagacatagaattcgtctgggttgacggcgccctgtacgaccatttcgccaaggccgaagctggcagtgacgaacaccacatcacggaagccggattcggtgtccagagtgaacagtacgccagaagcactgatatccgagcgcaccatcagttgtattccggcggagaggaatacgtcctcgtgcttgaagccatgatggacgcggtaggcaattgcacgatcgttataaagacttgcgaatacttctttaattttgtgtacgacctggtcggcgccgatcacattaagaaaggtttcctgttggccggcgaatgaggcgtctggtaaatcttccgcggtcgctgaagagcgcaccgctacggcgacgtcgttgccgctattgtcttttgacaacgtgtcgtaggcgtcacgaatatccttctccagttctggttgtaatggagcgtcaatgatccagtcgcggatttctttgccggcagccgtcagtgctttgacgtcctcaacatcaagggtggctagtttgtcgtagatccgtttggacaggttgttgtaagcgataaaggctttaaatgctgctgcggtggtggcatagccacctggaacagagactccaagggcagtgagattgccgatcatttcgccgagtgaggaatttttaccaccgacgcgggccagatcggtcaagcgcagttcatgtaaccaaaggatattttcgttcaagtacgatgctccgtttagggccatcgcctggaggagggctgtatggccgcgtccgtattaaagtggtcgtatgatgcagtgcataggcaagactgcacaagcttaaattggtgagatgtgtcggtgccagtcaattgagggagtttgcatgtcgacaatccggcctgtgttttatgtgtccgatgggacggggattaccgctgaaacgatcgggcattcgttgctgactcaatttagcggctttactttcgtcaccgagcgtatggtattcattgatgatgcagagaaggcacgcgatgccagccaacgcattttagctgcaagtcagcggtatcgggttcgcccgattgtggtcaattcttgcgtgaatccatatttgagtgtgattctggccgagagtggtgcgttgatgttggatgtattcgcgccgtttattggactgttggaacatgaactcaatacatcgcgtcactcccgtattggtcgagcgcacggcatggtcgattttgaaacctaccaccgccgtatcaacgcgatgaattttgcgctggctcacgatgatggcgtcgctgcgagttacgatgaggcggaagtgattctcgtggctgtttcgcgtgcgggcaagacgcccacctgtatttatttggctttgcattacggaatacgcgctgccaactatcctcttattgatgaagatttgaacagtgatcaattgccgttacgcttacgtccgtatcgcaaaaagctgtttggcttaacgattaatccggagcgattgcagcagattcgccaagagcggcggcccaattcgcgttatgcggcattggatacttgcaaacgtgaggtggcagcggctgagcggatgttttctgcggagcggatcaccacgttgagtacgacgcatacctctattgaagaaatctccagcaaggtgttggtgaccctgggactgcagcgggagatgttttgatgtcacttatacgccgacataccagatcgtgattgctggcattgtgatactgcttttggtgctgtgaaccgtgtagcatctgccgatgctgaacgacatgatgctccatcagcgcataccccgtttgagtcgtttgagttggctcatggcgctgtatgcggaaaattaccgacatttgaaaaggttgttcgcaccaggggatctggagaaggggagttacgtctcggtaattggtgatggtctggatctgtgtctggatgtgatcgagcatcaccgctatacggtcgatctgcgtttaacctacgagttatgcgaccccatgaccggtgagccggacccctcggcttacgtgcgcttgtatcgtgatgcgttacaggtggaagccacgcattgctatgttgggcgtcgttggcaagatgtgattggtttgtctcctcttccgggggagttgatgcatcatcggatgcgcatgaatatttttcttgggaagtggttggactatttggctgaacgcggccacggtgtggcgacattgtgtgctattggccggtcacatcgtgtgcgccgcgtgatgcgcggctaagacgtaagacgacggcttttgtgaaagcaggcatactcgcgtccccctcttgctgttgaatgtgcatatggcttataccccaatcattgccacgctcggttatgtgctgtcaccggaccaatgccgtgtgttgatgattcaccgtaatgcgcgttctggagatgtgcacctgggcaagtacaacggtctaggtggcaaagtcgaaccaggtgaggacgttctggctggcctgcgtcgtgagttatatgaggaagcaggcattgattgcctctcaatccgtttgcgaggcacgatcagttggccgggctttggcaaacagggggatgattggtttggttttgtgtttgtgattgatgcgtttcagggggaaaccaaaacgcacaatgctgaaggtgttttggaatgggtcgagcggcaacgtttattcgaattgcccatgtgggagggggatgccaagttcctaccgctggtgtttgacgatgatccgcgtccattccatggggtgatgccgtattgtgaggggcgtatgcagtcttggacgttttcccgcctttaagtgggttgggtacgatctgagtatgttcgatgagatagacaatgcttgttgttcgtgatgaatgtgttggcattgcatcttgtttgccgcatgggtgcaccagcgtatctgcgcttctttaaatagtgagccaatgagatttagaaccggatagcgatcaaggtaatgtctggtggctggtttgtatgccactggtgatgagtggtgaacggcaaaaaacggcactgcttatgattcagcctcaggctggatggctctgtgtgattgagataaggggcacagtgtctgagtgctgttgtgcgttgttattttccagatgcttaacagcgctattgggcgattgaagctaggcatgccactgctgattgctgtgaggcgatgcataaaaaacatgaatacatgaataaaaaaagagagccgcatgcgcggctctcacgttgtattgcatgtgaagcacaatgatgtgaatggtggttgttagaaacgtccgccgacgcttaacgttccgccacgtgcgatatcgccaaaggccgtttgattcacatccagcgttaatccaagcaatattttttcactgatggtgtattgcaatccgcttgacagtgtcgcgatggtgcctttgatcccgatacgatggttaaagttgccaatataattggcctgcgcgctgtatacggcatcacggttcttcagtgcccggtctatttcaacagcagccatccattttagatgcgtagttaatgggatggttgcgtctgcaccaagataagcagaagtgcgtttgaagctcgcctcgccgtaagtggttggaaacgcagcattttgctcgctgtattcagtacgggaaacgttgttgtaacgtcctccgagatgccagcccaacaaaacgccatgatcggacttaaatgtttgtcctgcttccagcgaagcgccacggcctttcatacgactggtgccgattcccgcctctgtattttcaaggactggacgttgcacggtgacgttgtagcgattaaatgccacggccggacgcacataccattggcttccatgaaaagcggtattccattgtgcatacaggcctgcacccagattgcctttatttttcaggtaactatccggcagggagcgggacagggagcgatccagggagaggccggcagaaaatgtttcggtgaacccatggcccagcttgataccggcgactttgtctctgttaccgtctatggagctgatggcagtctgtacagcccagcaggattgccccgccgcgtctatctgacagtgttgttgcaggcgggtcagtccttgacgttgtaagtccatcaccgagaaggtttctgcacccaatcgtgataaagcagtttttgtgttgtctgcatcgaccttgacgacggatggttgtgaaggcgtagaaggcgtagaaggcgtagaaggcgtagaaggcgtagaaggcgtagaaggcgtagaaggcgtagaaggcgtagaaggcgtagaaggcgtagaaggcgtagaaggcgtagaaggcgtagaaggcgtagaaggcgtagaaggcgtagaaggcgtagaaggcgtagaaggcgtagaaggcgtagaaggcgtagaaggcgtagaaggcgtagaaggcgtagaaggcgtagaaggcgtagaggtgtttgattgtgctggatacgtgattttccagacggtggcatgattgttgcctgcatcagtagcagcagttcctacggcgacagtgccatcagcggagagggctgatacctgggatcccccagagttatcgcttttgagtgttcctaaatccgtttttgttgcccattgataacctgaccagatgatggcgcgtgtgataaaagagttgtttacagcacgtccgcctgcgatggtcccatcggcagagagtgctgttactgcggacggtccatagttacctgttgcgagtgttcctaagtttgtttttgttgcccagttgtcgcctgaccagatgattgctgcggtgttgtctctatatgataaattattatttagaattatagttggtaccgataatgtcactgtaagattgccctccgataattttcccgtcggcagagattgcgtttgcattggcttgtcctaagttatcgcttcttaatgttccgaggtcggtttttgttgcccagttgtcgcctgaccaaacgatggctcgcttacttaatacaggtttattagtataattagggctttcaatatcagagtcagcatagcccacggcgattttcccattggcggagagcgcataaacagcagaattacctgaaccatcctctcttattgttccgaggtcggtttttgttgcccagttatcgcctgaccaaataaccccactaatagcattattaaagcctttgatattcccttctctatcattaggagaagctcctgcggcgactttcccatcggcggagagtgcataaacagcagatccacctacgttatttgttcttaacgatccgagattggtttttgttgcccagttatcgcctgaccaaatagtcgcttcccgtagattagaatacctggaatcaatggacgactgccccgcagcaattttcccatctgaagagagcgcgacaactatagaagcacctgaactatcgctttttaatgagccaagctcggtttttgttgcccaattgtcaccggataacaggaatgcacgattattgctggatgttgcgatggttttcccatcggaggagattgcttggccagtggatgcagcaccatcaagatgctgtgtcgccaaatctagtttctccgatatggatggcgaatttgcataggcggcaccggcgcttcccatcagtagcacggagatgagggtggccaacgttgttttcttataactctttctttccataaaatgtccttgagtgtgtgcgattgtcagcgcagttattccaatcaatcactgcgttgtatccttgatgcatccttagggtgattcctccttcagagggacaccctaataaatatatgcgtcaataattcgtgaattaaatcacattttgttgatggtgtgttagctgattgggtggtgttctagcggattgcttggatcgcaatgcgttgtatgtgttgcagtgggatgcattcgggataaaaggtgaagacgcattggcctcacgtcatgttcttgtaatcctttgaaagaaggattccattgcctatcaaggcttgcattccgatttaaggcagcgatccggtagccagtggggtagggaacgctccagagagcgattggcaatcatcgttcttgatgttgtaacgctatcactgcatgaccgagaaggttgctacacccggccgtgataaatagtgttcacggtgttgctcgcatcggaggctgagtgtgaggcggtgttggggtgtttggttcgctggccccatcagcagcgcgctttaatagtgttggatgttgctgagtgattgctttcgagtgtttctaactctgtttttgttacctagtgttcgcctgagcaggtggggatgtgtaggtatggtgcttcgtttttatttagaggatgaaagtccaagcttacaaccactccggcggcgatgtgccgccggagtgaaaaacgtacctcaatagtttgcacagaaaccgaattctgttgtgccgttcggttcaagcgtcttattccagtccagaccagaagcgatgagcttgtcactaccactcagtgaccacgtcgcactccatagggtttggatcgtccccttgagtggaatcgtcactgtccagctgctgcgactgctgccggtattagtcaccttgacacgttcgcagtagccagtatgccaatcgctgtccacggtgatactagaagtaatcgggtttttagttggatcggagccagcaccagggttaaaaccagcaccagggttaaaaccagcaccagggttaaaaccagcaccagggttaaaaccagaaccggagctagaaccggagctagaaccggagctggagctagaaccggagctggagctagaaccggagctggaactagaaccggagctggaactagaaccggagctggaactagaaccggagctggaactagaaccggagctggaactagaaccggagctggaactagaaccggagctggaactagaaccggagctggaactagaaccggagctggaactagaaccggagctggaactagaaccggagctggaactagaaccggagctggaactagaaccggagctggaactagaaccggagctggaactagaaccggagctggaactagaaccggagctggaactagaaccggagccggggagtggagtgcgactgatatcgggataagcgttgttgattaattttacaaattgagcatggaaccagtcaccagagagtggagcgtcaggtaatgcacctgttagcacaccatctggtgttgtaaatgtaggatcacagtaccggtcaaagcctttaccttgatcgttaggaatcagtgagctggaaccatcggagtaacctgggggtttaatccattggaaagcatccacatgaccacctggagttgcaattggaggtaaacctatccctgcatctttctgattacaccaattaccacggtgattacgacggtctatacgtccagaattcacataactattaacatcgtttccgaaagcggacgttgggcgttcaggtccaccccatccgttacgtccagtatcaatgatgaatccgatactggatggccagccagcagcgacaaaatcgttatacaaagtttctgaataatccatttcgtcaaaataacgattccattcgtagaatttagaggatctaataggctgtccaccgatatttagatcaggatttggtaggtttggttcaatcaacggtgtagtgtttgctgtgttggtggcaaaaccattgacactagcaaaacctgctgtagtgctttgaatgaccttggtgtacaaagagactgctggtatccggttagtatcccatcctagccagccagagtggccgatgtccatgtaattgtatacatttggaatttcagaaagtttattaagcgcatattttatgccttcttcgtaaattccggtattttttgcttgagcacaactaggagtactcatgttggtgataatatttggcaagctatccggttcaataatattgacaatgcggatatctttatattttggatttgaaaaaatactggcaatcgtatcaatatattctcttttataacgttgcagaccttctggggttaaaggtaattcaccattggaagctaatgcgtggcaatcgcgtccaggtatgtcataaataacaaaggttgctgtaataggcgtatttccttttttctgtgctaatgcagcgtctagatggcctgtgagattaagacgtcctggatttttcggaccaccttttactgcatcaatcgtatcaagccaaactcctgtagggtaattcttaatggtttgcattttttcttttaatgacacatcgttgactttcgcaatggaagtatcaatgtcttttgaataatctggattcagataggaggttgcgtcaacaaaggggttatcgacatgagcttcagcgtgaacatctggagttgaaaataaacttcccgctaatagtgaaacagacatcgtatattttaaggttttcaagatactttcagggaatttcaaactattcaccttgtagttttaaatgaagggtttttgggatggtctattgaggaaatattatttttttgtttgacttgtttattctccttttgttgtatgaaaatggaagtcgtgttgaattttgtttcagtaagaaataatggggcgcaatgaatttttgagtttattatttattaatatcctcaatatgttttggcgtgtgattttttagacactttcttgatatgttattaggtttgtggattgaattaattattcattatttttataaagtttgttattttggaaatgaaattttttgagtttcaatatcaaaaaacaataaaccataataaatatagagttgctgaatattctatgaaatttgggccgacgaatttaagtgatcatttataaaataggtgctgtttccaaggaatatcagatttaacttagatttatttcaatatcaaaaaacagtaaatcataataaatttagggttgctgaatattctatgaaatttgggccgacgaatttaagtgatcatttataaaataggtgctgtttccaaggaatatcagatttaacttagatttatttcaatatcaaaaaacagtaaatcataataaatttagggttgctgaatactcttatgtggcttgtgccgatgaatttaagaaatcatcatgatggataatatgacgctatccaaaatatcttatttgagacatcgtactcacttatgaagaagtgtgaatagctttatccgtacaaatcaaaagaaatgtgctaaatgggatgacatcgtgatagggagtattaaaacaagcaatgttgagtgattgccaaggagcgggcctattctaaggaggcgagtggcacttcaggcatctcggttagggccttaaacatgccgacaatgctgggttgatgttgttcttaacgatgttgatgagatgaccgtcaatagcgggatgctcataaagaagatcatcggacgctaacgaggaagcatgttgatgttattcattagtgtattcctcgcgtcgtttatgtgggcggtgacaaattcataaaatggaaagggtaatacctcaaagttactgaaacctacctagaaggcaatgtatgggggagcgatagccttcattagtgatatcaaaaaaaatgtagatggggggaggatgtcgaaaatggcttaccttgtttcgtgcaacgcctcatcctccaaacgcaacctgactacacgggagaatgcgcgggtgttctgactgtttctggactggtggtacacattctgagctatctatgacggatcgattcagtcttagaggctgattttgatgcgatggtatggcgctcccgatgttcagtcgacgataccgctggagagcccagcgaaacggtggcattgaaacccaagcccgcctctttcgcctgatggtcggcatgatacgaagaacgcaccatcggacctgaagcaacgtggctgaaacccaacgccataccgtactcctccaacgccttgtactcatctggagtccaataccgtaacactgggtgatgatgcgacgtcggctgcagatactgaccaatcgtgaccatatccacgtcatgagcacgcaagtcacgcaacgtcgcctgtacctgatccagagtctcccctaaaccgagcatgatcccggacttcgtaggcacctgcggatgctgtgccttaaagcgttttaagagagtcaatgaccattgataatccgctcccggccgcacattgggatacaaagcgggcaccgtctcaacgttatgattgaatacatccggcggacatgccgccaaaatatccaatgcacgatccatgcgcccctttcctcggaaatctggggtcagaatctcgatccgtgtctgtggcgcactctgacggatcgcagcaatgcaatcaacaaaatgctgggcaccaccgtcacgcaaatcatcgcgatccacactggtcaccaccacgtacttcaaacccatctcagccacggtgcgtgccaaactgattggctcctccgggtccggtggcttggggcggccatgtgccacatcgcaaaacgaacaacgacgcgtgcacacttcacccagaatcatgaacgtcgctgtgccatggctaaaacactcatggatattagggcaggcagcctcctcacacaccgtgactaaacgattctcacgtagcttggctttgagactttgcaccgcattgccggatggaatgcgaacacgaatccatgatggtttacgcaacaccggaacatctgcaaactgcacaggcgaacgcccaatcttgtcttcacccgattgctttactccaggctgcaatggggaagatgaaggatgatcatttgagacaacatgcaacgggatagaacggacaataggttgagtcatcgcaataccaaaataggctagaccgcttgcaaaaaactaagaactaagccatccggacgtggggtgcagcacgaaacaaaactgccgcgctaactcagcgagcaatgcagccgccaccgtgtccatctcggaaggaccccccaagtctaacaccgaggtcacctgcagcccccggtaaccacaaggatgaatacgatggaacggctccaaatccattgcaacgttgaacgccacaccgtggaaactgcaaccatggcgcacccgaatacccagcgcggcaattttggcgccaccgacatagaccccgggagcatgctcgcgccgctcaccgagaatattccactgagccagcgtattaatcactgcctgctcaatcccataaacataatcacggacaccaagccccagacggggtagatccagcagtggatacaccaccaactgaccaggaccgtgataggtcacctgaccgccgcggtccacgtgcaccaccgggatctccccagggtccaggacatgctcaagcttcccagcctgcccgagagtgaatacgggatcatgctcaactacccacagctcgtcaaccgcagtagcatcgcgtacatccgtaaaacgctgcatcgcatgccaaaccggcacataaggctgagcacccagcatacgcagcagtgcagcacgtccaacatgcgagggtgcaacagcaccacacgcattcacagcgtccacttcacttccggatgatcacgcagcacttggtgagcagcgtcatattgctcccgatccagcgcacggaaactaatccgcaccgacacatacttcccggttgacgaatgcttccaactgatacgctcttgcaccagttccaccccacaccgcgcaagtaaccgcggtaactccgtctccagcgccttacctgccgtccctaccgcgctcaactcgaacgtaccggggaactgaaaaccatgctcagaatgatcggacttaatctccatctcaccattatcagaccaactcagaacaaacccaagcccacaagcacctacgaaaaaactccaacccgacctagctcacactcagagtaagtgataagcaatattgaagccacccaatgtcttaaaccccatgcactacgaaatctttacgatgattcgggatggtcagcgcacatcgaaccataacaacgcgccaagcgctgtcgccagaagtaacgcactcaacaacaaccacggccaacgcgcagcacgatgcggcgttcgaacagacacagcagccggtggtagcgggacagcgacgtcctccgacatcgaacatgacagtggcaacaataaaaaaagcggactctccagtacaaaacggtgctgaccatcaagcacaatctgatcacccgcctgcaaccaagcatcgcggaccttgcagccattgaccacgctcccctcctctgaaccaagatcgcgcaataacacccgattaccatgccgctcaaacaccgcatgacgggccgcgaaaaacggatcatcaatccaaatatcaacccccgcctcttgcccaacgatacgcggtgtttccagagtgaagctacgcccatagtgacgtccaccaacaccacgcaacaccaagcaattccgatcaagcgtagcgattgcgtcatcgggtggctcagcttgaataccgatcacaagcatttccacaccatcggcatagacagcatcgccggcacgcaaccatgccatacgccgcaccgggcggccattaacatggataccacgaatacctttagccacctgtaaccaaagaccgcggttatccaaggagaattgcgctaacacgacgccgcgcccctgaacctcatcggcaaaggcaacgactccggacgcatgcctgacgatgcgatgcacccccggagagagcgtatgatcaggttgttgctgctgagaaaaatgaattttcaaaatactcaccacggggagcctagcagtttggccctacttgctgaagcacaagcctcttaaagtacatgccactggcggcatcaagacgactggccaaacacgatacgttcacttggacaaacgcaataccaccatgccccagatcactataacccacgtcctgagcacgcccctcatctgcctcaccatgaccacattgacgaccaaacccacggagcactttcacgtacacccatccatcatccattaatgaaaacaccttgcccttcaccagagcgatgacacccacccaccacaatcacactgcaactagaacaactccagatccggggtcatgccaagcaccattctctgctggcccaataataaaacgtcatcaaaacagaggatggcatatcctcgccaaaatgcccgactgaacgccacaaagacaccatccaatgcattacatggcacttgacatatgccgtaatagaatgcaatccaaaaacgtgtatcgagtatcctgtttcgtattacagatttgaggagagccgcaatgatcactaccaatcaccacaatgaacacgcctcccggaaagacccaaacgaacagacaaatgaccatgacaacgaagagttcacccaacgcttaggcaaatctgcagagcgggtctggcttgcggggatcggcgccctcggccgtgtccaatcagaaggtgcgcgtttctttgaagcacttgtcaatgaaggcgaagaaataaagcaacgcagacgtgaaagtagccttcacagtgcagaaagcatccgtgaacacgtcgaagtcaaattagaagaaacatgggaaaacacgcaacgcaactggcggcggatgaaccagctattcgatgaacggatacaagacatcttgcataccctcaagataccaacccgtgaggagatcgaagcattgcgccacgagatcgagatactgcgtaatgaactacatgaactacgcaatgagaagaaaacccgcactccgtcaccaagcaccccaaagagcaacaaatcgcatacagaagactgaaatctatactgcccatcaacgcaacaccgacatcgcaacacgcaacaccgcagtcttcgttttgagagccgatgcatcgaccagcagacatccaccgagttttttcgttattttcctgcactgcaaacgacgcaactcaccgcacgcaagcccatcccccctgcgcatgattcgtacccgttgccgccagcaacacacagccactctagcgacccaaccatccctaacgtaccggccagtgcctcacacctccccaagcatcgccccgtagcatctttacaacaccgcagaattgagggaactcatgaccatcacccatcaagtaacgctgccgaaaacaagcgatgcacttcaactaaacagacaaagaggcacgcataatgtctaaaggagtgactgacaaacggcatgtgcaaaaaacactatgagcgacaaaacgctatttgactgacaatcaggctttatatagcaagcatcgtagcaaccaaacacattcaaacccacgcgacaatgatgcatccgcatcgccatgtccgccaggactcaaccccaagaacgttactattctagaaatcatgcaaacctcagccctccgatgcatgtctataaagtgcacatacagagaaaatctcaacacatcacaatgacaatcagtgcaccacccatgatctgatgttcgcatcacgtactaccacctttagaacatgcgtgaacatgtaaacaccatcgcacaccctcatgaccaacatcacctaagtactattctcggaatgacagcgcaccggtcattcccacatcatgcggattcaccccttacttactgacacttcgccgatgcccggctcgcagtcctcttccccagctactgattcccgtctgcgccaactacgtttcatgaaagtaatggcgctgctactgctgctgatcatgctcggaggattcatactggcccatacccagggcaaccgcggcatctgggcctggctcggtgctttctgcgaagcagccatggttggtgcactggccgattggtttgcggtggtcgcgttattcaaacatccgatgggcctgccaatccctcacaccgccatcctgccacgcaacaaggatcgcttggccgatggcctggcacacttcgtacgcgaccatttcttagccccttactctcttctcgaaaaactgcgccttttcaaccccgcagcgcgcctgggcgaatggctctcaacacctaagcagacacaagcgctgacacagatgacacgtgactgggcaatccagacactgaatttactcaacgaaacaacagtccggaacgccatcgaacaccttgtcatcacacatctacgtgaatggaatgctgcaatcaccaccggcgatatcatggcgctactcacaactgataaacgccaccaacgcttgttcgacaaagcgctattacgcttagcacgttggttagacaacgacaaaatcaaagcacaggcttccgcattaatcgtgcgctatgcgcgccgtgaatggccaacactgatgggcaccgtgaattggatcacctccgttgacgaaatcggtgaccgtctggccgaacgcattgcacgcgccggattggaagaactgcaactgatcctgactacacccaaacacccattgcgccaacagtacgaactatggttacaagactacatacatcgcctgcgcaacgatcccgcgcttattgaacgcgtagaagaattcaaacaacaagcgatcgacaactcaaccatacaaacctatatccgggatttgtggacacaaatcaataccgcactacgcaccgacctagaaagtgctgactcaacattagccggacatttagaaggcgtattgcaatcgctaggcaaagcactctccgaagatccgaacctacgcgacaagttgaatgaacatcttctggacaccagcgaacgcctcagcgaacggttacgcgacaccgtgacccatcacatcgtttcgaccatgagaggctgggacgaacatcaccttacacggcaactggaactaaacgtaggttgcgacctgcaatacatccgtttcaacggtaccctagttggcgggatcatcggactcctgcttcacgcagtgatatatgggtgtgagatctatagtgtcatgggttaaaggatttaaaaccaataacaatgggattgtattcagtgaggtaattcatttaaagaataaagaaaaattatcagctgattatatggatgggttcttaaggtaaatattaatccattaaatattaaactataaggtttctattttatatatcgccgcatcttcagaattcttatcttctgggagtggtatgaaaatatttgaattcgttgcctttcactcatttaatatatttttatggtttactctaatgacagtatttatattgtttgcaagtgtggatctaaaaaagaaaatcagaagctgtataaatatagcaactgggtcggtcttatcatttttcgtttttttcattttttggtgatcacgtgggaattgcaacgcttgtccggataattcagcatccttggttggtgagtgacgacactgttccgcaggtttgcacgttgatcagtggtatcggcaacaggggtttggtatgaaatatactgctcaatcgtgctatgaaggatcagaggcgatgattttttcgcacgggttgaatactcccctcctcacatcaatcttgccacccagagctgcagttttttgatgactcggtctttaatagtgaatggtgcttggggcaatgaatacttgcgacgatgcatcgctatgatgattcgggagttttaaaagccgcgcgttacatcatggtgtttgaatgctaggggttggctggatttcatttatggggaacaacgtggtttttttctttattcagccgctgaagtaagagtttgtcgatgcgtgcgccgtctagatcaacgatttcgatacgccagccggcccagtcgaagtattcgccaacatgtgggatgcggccgaagtaggagatacacatcccggctaaggtgtggtagttgttttcctctgcgtctggcagttcggcgccgagtacttcgcgcagttcctcaatgggcagggtcccgtcgatcaggaatgagccatcttcccgagtgaccatcaaagcgtcttcgtcggtgttctccacgttttggagacggccgatcactgcgcccatgaggtcgctgattgtcactaagcctaggatctctccgtattcgtcgaccaccagcgccattgattgctgttcttcgcggaagatttctagcagtttcaacgcatgtgtggattcagagacaaagactggttcacatagttcttgaaacagggagagcgtggtttgactatcaaggcgtgtgatgacagatttcacttcgagaatgccaacgatgtcctggtcgctgctgcgatagactggatagcgtgagaactggtgttcacgcatgatctccaggttgtgtcccaggtcggcgctgttgtccagccaagcaattcgattgcgtggtgtcattaggctatcggcagtgcgatcacccaggcgcatgacccggttcatcatgttgcgttcgtaatcatcaatcacaccggcttcgtggctttcggcgacgagcatgcggatttcctcttcagtgactgcactggatggaatttttccaaatccaaggacacgcagtaccagttgggtggatttggccaacacccagacgccgggggcggcgatgcgcgctaacaggctcatcggaactgcgatggtgctggcgatgttttctgaatgtgtcagtgccagccgtttgggtaccagttcgccgaaaatcagtgttaagaaggtgatgagtgcgacggacagagttttgccgatgatgcttgtgtattcgcctagctgtggggtcaatgtggtcagccattgaccgattgccgcaccgattgcgtcgccgccaaacagtccggtcaggatgccgatgagagtgatgcctatctgcaccgtggatagaaagctctcagggctttgggcgagtgtcagcgctttagctgcgtgtttgctggagttggccatctgcttcagccggcttttgcgtgaggtcatcagagacatctctgacatggcaaagaagccgttgagaaagatcagcgcaatgacaatcagcagttcaaacacgcgcctcttccttaggtgacgtggccaggagagcacataggccaatgaggcctgggcgcgccgaaggaggggagtgatggagggagattaggtcgtggtccatagggcgtgccgtgagggcactggggcatgttaacaggatggtttggtgcttggctgggtgaatgcaggatggcatcaatgtccagtatctattccaatggtcacaatgactgttgagcatgatgtctgttgggatactggggtgtttccattcatgtgttggttgtaggccatgaggacttccagtaagcatgtctacggtctattttatgatgatgagggtgtcgacaatccggggaacatcttacatacgacgatgatgtgtggtgccgattgccagtgggtgtcggatgttttcagacggggactcttgaaccaatgtgccaagtgctcaatgcgtgtataggtggtgtttaccgaacttcaaggtgtccgagggtattcatggagttttaatcgtgatgatcgttgtagcgcagtgcgttcttgtcgatacggtgtggatttggatgttctgctcagtatgcgagatcagtgctgtgcgttgctatggttggtgatgtcatcgtacttgatggtgtttggatctgggtccggagaccctgggtagtttgtctggttgagcaccgtcccttgagcgttcaagtcagcaatattctggaatgagtattgcttttatgtcgcaagtgatcgatcaatatcaagctagatatatttcagacgactgattcagggggtgtcctggggatgttcgtacatcgcttgtacgtcttggcggaatgatgactggctgtcggggcggttgtaaaacatgtggccgccaggatattcgcgtacttgtatccgggttggatcgctgcccattttgggaatctggtcgatggtcaataccgatcccatgaaggggcaggaaaggtcgttccagccatgtgcgatcaacacgcgtagttttgggtcaatggctaccgattggcgtagttgtgtgactgagcctttacgcaactcttcgttccagtcccattgtcgatttacatcgtagttcagcgcttgatagcgttcgtgtactttccacccagcggttcgggtgacgaagtcgaccatggctgtggtggttggggcgatgatgctgtctagtagcgggtcgttggtgcgctgctcagaatcgtagggaaacgggtccaatgcagtgacgttaatgtcatagcggctcccaagttcgcctgtatcacggaatacttcacgtaggtaggcctgcgtttccagacgtccgccagcacggcgtacataagtcggatccaatccggttaggtgtacaacttgctgtagcatcgtttcggtggccgcaggatcagagcggcctttcatcagtgtgctggcatagtcgccacgtgtgtactcaatcacttcgcgcatctttgcttcgcttaactgatgttggcgttctaggtgtgcggcggcgatagaaggcagggtcattatccaggctaacggtgaaacatcactattgtcgtccagagtcgggttgaggtagggcgagaccagtaccagtccattgagtgcaatacccatctgggtttgtaaggtgtgtgcaatacgtggagcgcggaagccgccgtagctttcacccaccaaatatttgcgggagaggagacggccattggcgaccagccagtcatagatcgtgcgtgataagtagtcgacgtcggccttggggttgaagaattgttttttggcttcctcgccttcaatgcgagcacggctgaagccggtgccgattgggtcgatgaatacaagatctgtaaagtccagccaagtgccggggttgtcgtgcagtatcgcggggtcggatgggctggtgccttgggtgccgaagtgaaccactttggggccgatcgcgcccatattgaggtaaaccgaggaggctccgggaccgccgtttaaagcgaaggtgaccgggcggttgttgcctttcatgatgtaggcggtgaacatcacctcgccgatcgtcttgcctttgtcgtcttgtaccggtaaagcaccaatgatggctttgtagcttagggtgcggttaccgatgcggatgctttgccgtatctgtgtgttggctggtagtgcggggagggtggtagcaggtgtggtggtttccttgtcgggcttggggggcgttgccgttgcgtaagccaggggaacactactggaaacgaggagcgacaaaagagcgatgcgagggatcatggccatgtgaatagatttggtgagaaatgagagcagtcgcggtgagcagtgggggtatcagaagttgctggaggccatgtcttcatgttggggttggagggcttttggggttggagggctttgtgtggtgcgtttgtatcgcgatgatcgtgaggtgtttgtggtcgatgatttggtcgctgtgtgttaccggtctgcgtcggtgacacggatgttcaggtctattgattgatccgaatgcgctttggtggattttgcatggggattgtgctctgccggtgagtgatgtggtggtgtggtttcgcggctgtattgttcaacgtgcatcgttgttgctttcagaacctgctgttgttgttctattggcgctctccatggagtgagcgtctgggtttgaagatgcccgggtatatcgcacagcaggatgctggggcgaggctatcatatgtggcagtgctgtgatgctacatgagccaggttttcaatagcagtggatagttgtgcatcgcaaatgacacattcgttttttgtgcagtgtgttggttatgcggcatgctgtgcattgatggctgatgtatgtcgttgtgcggtgagaagatctttggtgcatgacgtgtgggagaggtgattggcactttgatctgttttgatggttgatccggatgccggatgccggcgttggatcttggggctatgcgaatgttgcaatggctgatttttgtggttcttatggatggtctgctagatgtctagtgacgctaagttacctttggtttccagccattgtttccgatcgcttgcgcgttttttggctagtagcatgtccatcagtgagcaagtctgggtgttgtcatccatggtcagttgtacgaggcggcgtgtatccggatgaatggtggattcgcgtagttgctgcgggttcatttctcctaggcctttgaagcgggtgacgctgacttgtcccttgattttttcacgctttatcttttccagcagcatggtcttttcttcatcgtccaatgcataaaacacttgcttgcctacgtcgacgcggaacaggggtggcattgctacgaacacgtgaccggctgcaacgagggctgggaagtgtttgaggaatagtgcggtgagcagggtggcaatgtgcaggccgtcggagtcggcgtcggccaggatgacgactttgccgtagcgcaatcctgagagattgtctttgccagggtcgcagccgattgcgattgccaggttatgcacttcatcggaggcgagtacgttgccggaggcgacttcccatgtgttgaggattttgccgcgtagcggcaggatcgcttggaaatctttgtcccgtgcttgtttggcgctgcctccggccgagtcgccttctaccaggaacagttctgtgcgtgacaggtccaggctgatgcagtcggctaattttccggggagtgcggggccatgggtgattttctttcgggtgacttgtttttcggttttcagacgtgcgctggcacgttcaatagcgatctgcgcaatctgttcgccaatgtctacgttctggtttaaccataggctgaaggcgtcatgcactgtgccttcaatgaaaccagccgcttggcgtgaggataagcgttccttggtttgaccggagaactgggggtcactcattttcagcgacagcacaaaagtgacacgatcccaaacatcttccggcgctagtttgattccgcgtggcagtagattgcggaagtcacagaattcgcgtagtgcgtcggttaatcctgagcgcagtccattgacgtgggtgccatgttgtggggtagggatcaggttaacgtagctttcttgagtgagttctccttcggggacccaggcgaccgcccagtccactacttcggtatctttcttcaggcagccaatgaacagctcggcaggcagcagttcactttcggtcatttcgcctttaaggtaatcacgtaagccgtctttgaagtgccatgtgttgatctctcctgtggcctcttcgagtaattcgactgtcaaaccggggcagaggactgctttggcacgcagtagatggcgcaatacacgtacgttgaatttaggggtgtcgaagtattttgaatccggccagaagcgcagacgtgtaccggtattttttttgctgactgtgccgagtactttcaatttggatacggcaaagccttcgcgaaattccatgtggtgttcgctaccttcgcgtttgatgaagagatcaactttactggatagtgcgttgaccacgctcacgcctacgccgtgcaatccgccagaaaaggtgtagttgcgattactaaatttgccgccagcgtgtagcctggtcaggatcaattccacgccgggaatcttctcttctgggtgaatatccactggcatgccacgaccgttgtcggcgacttcgcagctaccgtctttgtagagtgtgacttcaattcgattcgcgtagcctgcaagtgcctcgtctactgaattgtcaataacttcctgtgccagatggttgggacgtgtcgtatcggtatacatcccggggcggcgtttgactgggtccaggccagtgagaacttcgatgtctgcggcgttatagcgggagttcatgcgtcttttggggtggcctgaggtaacgtctaagtgtgctgtttgctacaaatttttgcacgccattcaggttcgttcagtgaaggtcttgctattcctggtaggctcggcggcggaattccaattgaagtcgccctatttcgggtcaggacaggaacttccggagtcgcgaccatgaaactgaagtacctagtgatgctcatgctggtccccgctgttgtgggagtcgccgtgccaagtgctctggctcaagcccccaaggcatcgtcgaccgctactgaaatgcaacagccagcctctccttctaccgacatgcctactaattccgaggggcagggtatgggtgagcacacgggtgagcacaaagcaagaaaaagcaagaagcatcgttctcatactgttaagcccacgagcactggcagtgctactgcgcccacgaaggaagcagaagagaacacctctgttaaccgttgatctagttgtttagttactgcgttgacgccccggatgatcccggggcgtctttagttttgtgccccaatagccccaatacagttgtcgttcttagtggtgatgcttgggcatcggagaagtgcccgttagactattggtttacctgagccatgtggtcccatgactcctcttatttttgttactggtggtgttgtttcttcccttggcaagggcatcgcggcggcttcccttgcgtccatccttgaagcgcgtggtttgaaggtgacgatggtgaagttggatccttacatcaacgtggatcctgggacgatgagtccgttccaacatggtgaggtttatgtcactgacgatggtgctgagactgatctggatttgggccattacgagcgttttgtacgcacgcggttgtcgcgtaacaattcagtcactactggcaggatttaccagaatgtgatttgcaaagagcgccgcggtgactatctcggtgcgaccgtacaggtgatccctcacattaccgacgagattcgccgttgcattgatgaggctacagcaagctttgatgtggcgttggtggagattggcggtactgtcggggatatcgagtcgctgcctttcttggaggcgatccgtcaagtgcggattgagcgtggtgcggagaggacgatgttcatgcacttgacgctggtgccgtatattgccgctgctggggaactcaagacaaaaccgacgcagcattctgtcaaagagctgcgttcgatcggcattcagccggatgtgttgttgtgtcgttccgagcaggtgattccggattcagagcgacgcaaaattgcattgtttaccaatgtttccgaacgggcagtgattggctgtcccgatattgacgtgttgtatgggatgcctttggagctgcgtcgccagggtcttgatgaaattgtgattgatcagttcaaactaagcggaacagcgagcttggctgatttgtccgaatgggaggatgtggtcgacgcgattaagcatcctctggatgaagtcactatcgctgttgtcggcaagtacgtcgattatcaggatgcctataagtccgtgggtgaggcacttaagcatggtggcctgcgtcagcgtactaaggtcaatctgaagtgggttgaggctcaggatttggaggggagcgatatgggtgcccttaaagacattgacggtattttggtgccggggggattcggtgatcgtggttttgaggggaaggtgctcgcctccaggtacgcgcgtgagcagcgggtgccgtatttcggtatttgctatggcatgcaggcggcggtggtggattacgcgcgccatgttgccgggcttgagggtgctaacagtactgagaatgatcgccagtcgcctcaccctgtcattgctttgattaccgagtggcggaccacaacaggtgaggttgagcgtcgtgatgagaagtccgatctgggcggtacgatgcgtcttggtttgcaggagcagcgtctcaaggcagggacactggtgcgtgagttgtatggaagggatgtggttggtgagcgtcatcggcatcgttacgaatttaataatcgctaccggactcagttggaggatgccggtttggtgatcgctgctaaatcgatggacgacactttggtggagatgatcgagttaccacgtgagatgcatccttggtttctggcgtgccaggcgcatcctgagttcttgtcgactccacgggatggtcatccgctctttattggttttgtgaaggcggcgcgcgcgcgcaaggctggaggcaaattgctcagggaagtctgcgtttgaacctatgggtgtttctgatctgatgtttgatttttgatgaagatgtgtttcggatcggaatcaagatatcttcagggaggttgagggagagaaatgtcctgcgttgcgtttgtcgtttttttctgtgttgctcgtgattcctaaacaatcaggtgatgtgatgaagctttgtggttttgaagtcggtcttaaccagccacttttcctgattgccggtccttgtgtgattgagtcgctacagttgcagttagatactgccggtgtactgaaggagatcacttctaagcttggtttgaactttatctttaagtccagttttgataaggcgaaccgaacttcggggagtagttttcgtggccctggtttggaagaaggattgaaggtgttggaggcggtgaagacgcagattggggtgccagtactgacggatgtgcacgagtacacaccaatagacgaggtagccactgttgttgatgtgctgcaaacgccagcgtttttggtacgtcagactgatttcatacggaatgtctgtgcggtcggtaaaccggtcaacatcaagaagggacagtttttgtcgccatgggatatgaaacctgtggttgagaaagcaaagtcgacgggtaattcgcagattcttgtatgtgaacgcggcgcttcgttcggttacaacaacttggttagcgatatgcgttcactggcggtgatgcgcgagaccggctgtccggtggtattcgacgcgactcattctgtgcaacttccgggtgctcagggtggtcgttccggtgggcaacgcgagttcgtaccggtgttggcgagggcggctgtggcggtgggtatttccggattgttcgctgagactcacccagacccacccaatgcattgtctgatggccccaatgcttggccgttgcacacaatggcgatgttgctggaaaccttggtggagttggatgcggtcaccaaaaaacgaggtttccttgagcaggattgaatcaatctgccggttgcaggaaggctttggtttgggtggatggtattccttagttgccttgcttatttgtgtgttgggctggtgatcgtcctccgtgtggaggtgggtgagttggttgtgatgagaatggcgcatggtgttgaacaattttcaagctcgaagcgttgatgaatgtgagggttatctttggaattcacttcagggtgggatggtggcatgtgaatgctctggattgtcgatgcgagatccagaatgagatgcatgcgttgtcgcaatacctgatgcagtgttccaaatcaacggagccagggtggtggtcttcagtgatatgatcctggcgttttcttagatcttttggggccggagctattttgcgagtcgcgctaccgcgatgataatccgatggttctctggtattgctcccttctttggttgttgactggacccatgaccgctattgccaaaatttatgctcgtgagattcttgattcccgtggcaaccctactcttgaagcggaggtcactctggagaatgctgtctgtggccgtgccgcagtcccttcaggtgcttcgactggtaccaaggaagcggtggaattacgtgatggtgacaagacacgttacttaggcaagggggtgcgtgcagcggtggataacgtcaatggtgttattgctgcggcattggtgggtttcgatggggctgaccaaacaggcttggaccatcgtttaatcaatctggacggcaccgagaataaggggcgtttgggggctaacgcgctgctcggtgtttcgttagcaaccgcacatgcggttgccgccgcgcgtaaacagccgctatggatgtatttgtccacgcttggtgaatccaaggtatcgttgccggtgccaatgatgaacatcatcaatggtggtgcgcatgcggataacaacgttgatttccaggagtttatggtgttgccggttggttttgcttcgttttccgaagcactgcgtgccggtaccgagatctttcatgcgctaaagtcagtgctgaagggacagggtttaagtactgcggtgggtgatgaagggggttttgctccggacttgcgcagcaatgttgaggcactggatgccattcttgaggcaatcggtagggctggttatatcgctggtgaggatgtgttgttaggtttggatgttgcctcttccgagtttcgcgacaacggtaagtacaacttggttggtgagaacaagcgtctaaccagtgagcagtttgttgatttcttggatgactgggttacgcagtacccaattatcagtattgaggatggtttagccgaggatgattgggcgggttggaagcaattaactgaacgtatcggccataaagtacagttggtgggcgatgatctgtttgtgactaatcctaaggttttccaggaagggatcacttctggcatcgcgaatgcgatccttataaaacttaaccaaatcggtacgttgacggagactctggaatcaattgcgatggctcatcgtgctcagtatgctgctatcgtctcgcatcgatcaggcgagactgaggatacatccattgcggacattgcggtggcgaccacggcaacccaaatcaagaccggctcgttatgccgttctgatcgtgtcgccaagtacaaccagttgttacgcattgagcaggcccttggtgtcggtgcgcgttatgctggtcgtgatgcgttcgtttccctgaagtcctgatttgtgcgtaactggcgctggttattgctggtgcttgcggcattgctgtcttggttacagcaccgcttctggtttggccctggtaactccggcgaggtccgcatgttgcaggtgcaaatcgttcaacagcatcaagagaacgagcgtttgcgtcagcgtaatgcttcgcttgctgctgaggtcaagaacttgaaggatggcgatgcagcgattgaggagcgtgcgcgcagcgagctgggcatgatcaaacctggggagatcttctatcgtgtggttgaggatattcctacaccgctcccgaacgatacatctgcagatcatggagttgatctggcgcaacctcgcagagaaaaacgatgagtgttggtgtttgggcggtgatccctgcggctggccgtggggtccgatttggttctcctgtgcccaagcagtatttacccgttgttgggcggccgttgattgtctataccctggaagcgttggcagcacatccggcggtgtgtgggttgatggtggtggtggctgagggcgatctggcttggtccagctggacagaggtggcaggtaagccattgttgacttgcagtggaggcgtgacccgtgctgcttcggtattgtctggcttgttggcgttgccacaggtggtgcacgctgatgatttcgtgttggtccatgatgctgcgcgtcccaacgtggctttgtccgatctggaacgattgctggaggcgggctgtgcccatccagtgggtgcgatcctggctgtaccagtgcgcgacacgctgaagcgtgccggtgctgatggcagtattgatggcaccgagccacgtgaacggttatggcgtgcattcactccacagttgtttcggcgatctcagttggtgcgcggtttgcaggtcgctgcagcggatgggatcgagatcaccgatgaagcgatggtcatggagcggcagggattgcgtcctcttctggtggagtgtgccgagagtaattttaagatcacgacgccagatgatttggtgcgtttcgagtttgaattggcgcggcgtgtttgagtggcttatttagggggagagtgatgacgggtttgaatgttcgcatcggtcaggggtatgacgtgcatgcgtttggacccggtgatcatgtgatgttgggtggggtgcgggtgccgcatcgttgcggtgtgttggcacacagtgatggtgatgtgatcttgcacgcgttgtgtgatgccatgcttggtgcgttggggttgggtgacattggtcagcactttccaccttccgatgtacgttggaagggagcagacagtggtgtctttgtgcgtcactgccacctgttgctgcgcgaacgtgattggtgtgtcggtaatgttgatgcaactgcaatctgcgaatcgccgaagattgctccgtatgtcaatgcgatgcgtgaggggattgcgcgcttgcttgaagtgcaaccggagtgtgtcagtgtaaaggctacgacgagcgagggacttggttttattggtcgcggtgagggccttgctgctcaggtcgtggtattgctgtatcgccttaacggtgtcgtggtgtaggggacaaagaatattgcttgatcgctatagagttaagtcttgggtgtatccactccgatcttccgttgcgatgtgggtggttgatgagttaggggttgtggctctgaacaacgtaacgtggaagtgtcgctattgaggtgggtattgttcaggtgtgcagtcactagactgagcgatgtcggatgtcgtaagttcagtgagattgctatatgcgcttggctgtcgctccatgtcgaattggtttagtggtgcgttaatagcaccaatactgcgccggtgccgccttgagcgggtggtgaagaatggaacgcaagcacatctttgcgtaagcgcagcaattgattcaccagatttttcagtactggggtgccgccgttggattgcagtcctttaccgtggatgatgcggacgcagccatattcgtacatatgcgcttcgagtagaaattggcgcagtagtgtttcagcttgcacgacagtggctccatgcaggtccagttcgtcctgtaccgaaaactgtcctcgcttgagtctctggaacagacgcgaaggcagggctttactgcggtagctgatagtgtcgccagcttccagtggcgctgattcgcgtagtagctgtgcaaatttgcttttcgcctcgtcttggtggtgttggatgatgcgcctgcggggccgtgagggaggtttgatggtgatggccatctcgcttgggcgcagtggccgtacaggaccgatcgcagcacggaacagtgcggcatcatcatcattgtcattgtgctgtgtcatagggtacgtggatagcgtgtcatgctccaaggagttgcccacatgtccctggtggattattcctgttggagagtagcagtgcatggatgagggtaaatggggaatgtactcagaagcaaatccttaatagcagggggtgttgttagcttagcgagcgacataaggctaatggtgaagcaatttttgacccaattctgactggaaaaacaataaacgtcttttgcttggtggtaagggaagcggatgattgctattgagtaggcgttggaaaataggtggcacgggtgttatcggtgtatttcttgtgggtgaaagtgcagtttgagatggaacttgaattggcagtgctcgtcaaaatgtcgagcgccctgggggtgttattaggttggtacgctgtggccagtgtgctggtttctggccatatccataggtttctatcgttaaggtctgtgccttaacgatagttttattatttagtgtttacttgccttttacctttatttttagacggtaaatggcatggcttgctgtcacgtaaagaacagggttattttctttatccagtgcaaaattcatattgccgacggtgccaggtaggatcactttgccaagaagttttcctttgggggaaaatatttgaatagctccttcactacttgaccatatatttccattggcatcagtcacgatgccgtctggtatgccgtgtgaaatagatgcaagtactcttccatttctaagtgatttatcttttttaatatcgtaagcgacaattctgctatttagagcagagttattagagttataggctaattcactgtctgcgatataaagcgttttttcgtcaggactgagggcgatcccattcggtgctttgacaagaggtgtttttaagcgaacgatggtgccagtttttggtgagtagcgatagctgtaatctcctccttggactgctttgccgccatagctttctttaggattattgatgccgaatgcaggatcagtgaaccatatatcgccactgcgatcgacaatgaggtcgtttggactgtttagtttatttccttgataagaatcgaccactatcgtccacttgccatctttctcaagacgttctatcgcccttttcccatgcgatgctgcgagtaagcgtccttcattgtctaaggcatggccattttggaaatgtgacggttctaaaaagacggaaactccttttccttcttgccagcgaagcacgcggtttgctttgacatcgctccaaataaggctgccgtcaggtaaggtttgaggaccctcaagccaaatcccttggtcatagagggtgatgagttcaggtgctttatcgatcagtgtttcaaaaagtggatcttctttttgaattttcgcggtttgaattttggtgttgtgtggtgtcgtgatcccgtggaatggaagcgttagaaagaatccagcgatgatggtgtgagtgaaataattttttcgtgtggctttcattgaagcatccttattttgtttcttaatacattgcatagcggtgattgttttgagatttataatgttttatccatttttgatgatgtggttactaatctctcgacacgatatttgtttatttttttgtgcttttgatactcctacggtgtcgatgggtgtttataggttttgatagtttgggcctgatccgccttctggggtgatccagtcgataatctggtacggatctttgatgtcacaggttttacagtgcacgcagttggctgcattgatgtgtaagcgtttgttggttgctgagctggggtcctcaatgatttggtagacgttggctggacagaagcgggtgcatggattgccgtattcctctacgcagcgagtgacgcatcgttcggggtcggtgatttttaggtggatgggttggtcttcattgtgcacagtggccgcgaagtagacgctatgcaggcggtcgcgtggtggcaaggtgcgttgcacgtagtcgtgttttgtttgttggtctttgtcgagccgttgcagtgcggcccagtctggtgtgtttttcaatgtccatggagaaacgccacgggtagcggtctcccaggcggcgttcagtaggcccaaccataagccttttttgaaacctggcttgatgttgcgtacttgttttaattcggtcattgccttggaagcacgcagtttggcatcaaatccatagggggtgagttgggtggcgacgagatgttcggcagcgagcatgccgctgcgaattgcttggtgtgttcctttgatcttggggacgttgagtaagccggcagtgtcaccgatcaacagtgcgcctggcatgtccactttggggagggattgccagccgccggtgacgatcgcacgtgcgccacccgataggatgtcaccaccttctagaagcagtttgatgagtgggtgatttttccattgctgaaatgcttcccagggttcgtactttgggtcgtgatagtccaggccgctgacataaccgagtgcgatgcgattgtcattcaggtgatagaggaagccgcctccgtaggtatgtgtatcggctggccagccgagggtatgtaagattttgcctggagagctacgtttttctgggacgtgccatagttctttgattccgatggagtaggtttgcggatcactgttttgatctagtgagaaatgtttaatcaagtgtttggtcaggtggccgcgtgcgccttcggcgagtacggtgactttggcattgattgcaatgcctggggtgaagctaggtttgtgtgttccgtttttggcgatacccatgtcgccaatgcgtactccaatgacttggccagccgcgtcgtgcagggtttcagtggcggagaagcctgggtaaatgtctacgcccaatgcctcggcctgaggtgctaaccaggcgcatagtgcaccaaggctgacgatcacgttaccgtggttgcgcaagctcggcggcatgatcggaaatttgtgtgcgccatttttgctcaggagccagaattcatcctcggttgcagggacgcagattggaggtggggcgttgcgccagccagggagtaggctatccaggggggcaggttcgatcactgcgccagagagaatatgtgcgccgattgtgctggatttttcgatcacgcataccgatagttcagggttgagttgtttcaggcggattgcaaaagctaagcctgctgggccagcgccgacggtgacaatgtcatattccatgacgtcacgttcgatggtgtttgtttctgtctcctgctccgctgccaacatgctttgctcctcaaataagcgtgatagcttttgattattttcctggagttctgtaatagcagcaaatgactgctgtgtcttgatttgtcgtgttagggggatttgtcatggatctgtttccgttcttgccaggtgcgcggatttctctgcagtcgggatggttgccatccggtgcggctgatgctttgttggcagggctgcttgaaggggttccttgggaagtccatcgcatccacatctttggccgtgaggtgaactcgccgcggttgtcatgttgggtgggagatccgcaggccagttatcgttattcgggaagatgctttcagcctcgtccgtggtggccggcgttagcggcgctgcgtatgtgtttagagggtgaaacgggtgttgtttttaacagtgttttgcttaatcgttatcgtcatggtggtgatgcgatcggctggcatagtgacgatgaagcggaacttggtatagatcctctgattgcatcacttagcttgggggcttcacgccgttttgtgttccgacatcggagggagcgtcatttgcgtgctgaatgcgttctcagtcatggtgatttgttgctgatgggagggaggactcagcgtgactatcagcatgctttaccacgcactttgagggtggtaggtgagcgggtgaatctgacgttccggcgtatcctgatgtgatgtttgtgatttggtcagatgatctagggatgttgcggggtgtttttaatggtgtagtggggcgcgtctagccgattgcttcttgcttggttgaagttgaggcatccgtgtttcctgtgctggtgatgaggaggttggaataacaacatgctgttgtttgtgatgtcatggcaaacaggattggtttgtatgtcttagtgttgtgaaggcttgtcgttggagatagcgtcgctctgacccatggtcagcgtccagccaaccagttcattggtcaattgagtgagtgcttgcccgaatgcgttggctaccgtggaggtatcggtatttgttgccggctgtgtgacgatgaaagtacgcgaagcgatcaagcgtttattgtgtgcgccgatcaatttggcgttgacttcaatggttgcggttggcattggtgttccggcgtaatcggattcaaagcggcgcaggtctaagctgaggctgtaatcggtacggatgccggttcctgcccgagtgacgccagcaatttttcctgaatcttcgaagacacgtatgagtgcgtcttcgagcatgtcggtggttggttgcgcccaactgacgttccggtagacctggatctcacctggggtaggttgtacgttgatacgtggggtatcgatcatgcgtggggctttggggtggagtactgtcagatgccaagtcactctaggccaggagggatcggtggtgacgtggatttgtggtgaataaatcgtggtcggttttttttcgcctagcagtgttgaggagcagctggcgagcgtgagtacggataggcacaccaggggatggatcagcttcattttgggtcgaattccttcggagcattgcggccgagtaggtagcgtttgggattgtcttcgagtttgttgctgatctgacgcaagtcacggatcaggttgcgtagttcgctcatagtcggagcaaattggctcaggccttcgctggcaaagctgttgatggctgcttgattgttgtcaaggatgctgtttgcgttgctggcagttgcgtcgatcttagtcaatgtggcttcgagtttgttgaggatgaccggcagttgtttcaccaggttattgtccaattgctgcactgtgccgttggtggtggccagggcggcgttgagttggcgtgtggcatcgtgtgcgctggtcagcagtgctttcaagcctgtgtcactgtcggatacttggccgctgattttctgcatgttctgcaggatggtcgagatcgctgcgacattcttgtcgctgaggacatcgtacaaacgttcgacgatgtcgttagcagtgtcggtgatgttctgtaatgcagacggggtggtttggataatgggtgcatcatctttataaatgcttgtcagagagggtgattccggggtgccgccagataattggatgatggatgggccggttaggctggtgattgccagtttggcgcgcgtgtctttcttgacaggtgtggttgagttgacacgtatatgtgcgatgacttggcgtgggtcgttcggggcgagagtgagttgggtgatcgaaccgattgcgattccgttgtactgcaccggactgccgacggataggccggtgactgcctcacggaacactacgcgatagttttgccaggtgcggtcggaagagtacttggctgcccataggccaaaaattagcagtgccagcccagtcagaatggtaaaggaaccgatcaggacgtagttagctttggtttccatggttcaggtgcttcctgtagaggtgtgctgtgctgtacgcgcagcacgcccccgtggtccgtgaaaatactcacggatccacgggtggtcgatggtttcaatttctgctaacggtgcgttggcgatgactttgcgttcggctagtacggcgacgcgattacagatggtgtacagcgtgtccaggtcatgggtaatgagaaacacggtcaatcccagtgctttttgaagggtcttgatgagttggtcaaatgaggctgcgccgataggatccaaacctgcggtgggttcgtccagaaatagcagtgggggatccagcgctagggcgcgtgccaagccagcgcgcttacgcatgcctccagatagttgcgagggaaacttatccagtgcgttggcgggcaatcctgcaagcttgattttgagtagcgccagttcgtagtacaggcgttttgggaactctccgtgatgttctttcattggaacttgtacgttttcgcccacagtcattgaggagaacaaggcaccatcctggaatagcacgcccgtgttgcgagcaatgatgcgtcggtcctcagaggtttgtgagtgtgggttcactccgagtacttcgattgacccggcgttgggggtgcgtaaccctaggatagtacgcatcaacactgattttccggtgcctgaaccaccgaccacaccgaggatttcaccacgatggacgtctatgtctagtccatcgtgcacggtttgcgccccgaagcggttgattaagccacgtacgcggattgccaagtttgtttccttatgttctccagcgatgggatgtgttgttgttttgctcatcagtttcaccaacccatacgcatgaaccacagtgctgctaaggcatcaatgatgatgactagcgagatcgtttgtacaacactggaggtggtatgtttgccgacggattgtgcggtgccggtgactttgagtccttccagacagccgatcaatccgataatcagtgcaaacagcggtgctttggacatccctattatgaaatgccggaactgcatggtttcgtgcatgcgtgataagtacatttgcggagggatgcctaggtcgaatgcgccaacggtgattcctccagctaagccggcgatcattgcgatgaaggtcaatagtgggagcatgaccagcagtgcgataagacgtgggatgactagcaggtcgatcgggtctaggcccagagtttggattgcgtcgatttcttcgcgcgacttcattgcgccgatttgtgcggtgaacgcgctggcggtacgaccggccaggacaattgcggtcaacagcactgcgaactcacgcaggaaggcaatgttgactaattcgacgacgaagatttctgcgccaaagttgcgcaggatggtcgaacctaggaatgcaattaccgcgcctaccaaatacgacagcaccaccaccagaggcaccgcatccaaaccgacttgctccatgtggtgcacggtcgaggtgatgcggaaccgccgtggttcgcgagccagttgggctatcttcaccaagttctcgccgaggaagctgcatacgtcgacaatattgcggcgggttttgacaaccgcgatgcctaggcgttccagtgctgcaagaaaaccgtagtcacgttcaggttttggatactcatcgtcgagaatctcaattgtggagatcaaggggcggtgttcttcacgaaatccgattgcgtcgtttttcagtcctgtacgtgtggcgaaacgcagcagctgtaatgcaccggccgaatcgagttggtcgatattgcgtgcgttgatgtgctggatggagttgctatatgactgaagtaattcggacgccgtcaatacgttagccaacacccagctgccgctcaggtgtatctggccacggtcttgggcgtcttgttcaatgcgcggcgcagtaacggtctttgtcggcataataaggctgtaagcataaccggttccgcgtgaagtacgaagttcgatcttcacgtcagagacgacatacactgactctcttcgctattcgtgcctttttgtccgacgcatgtcttctgcccctcttctttcacctgccctttccaccagctatgcacagcgtgttgcgtttgtcgctgagattgccggacgcctgcatacatatggcaccaccgcacagcggctggaggcatctttggtggcgctgagccagcaacttggattggattgtgaaccatggtccaatccaacgggcatcattctcagctttagcgatccagccaaggcaatcggttcaagtgatattacccgcgtgatccggttggcaccgggggagaacgacttgtacaagctcagcgtggctgacaatgttgctcaagcagttgcttctggacgcatgagtatctctcagggacacactgcattgcgccggttggatcgtgagttggatcgacgttccaagatgatgcgcgtgttcggtttcgggctggctgctggtggtgttgctgggttatggaagctgccgtggctggatgtcgctactgctgcgacggttggtttgctgattggcttgctgacacagtataccgatcaccgtgctgcgactcgtgaggccagtgaggcattggccgcgttgctggctggttttgttgcgacgttggtagctacgctgattggtccgatcaatctgaatacggtgattattgcttcggtggtggtattactgcccggtatgtcactgaccaacgctgtgaacgaattatcaagccagcattgggtctcaggtacagcgcggttggctggtgcattgactgtggtattcaagcttacagtcggggctttgatcgcagtgagtttgtgcaagctgattgggctaaaaccgcaaatatacgtagcgcagcctcaaccgcaatgggttgaatgggtggcgttgttgaccaccgcgtatgggtttgctgtgctgttcaaggcacgctttcgcgattacccatgggtgatggcggctgctatggctggttatgtgatcgcacgctatgccgggaaattaagtggtaatgctgcagaaggggtgttcctgtcagcaatggtactgactgcagcaggcaatttgtttggccgcttaatgcccaaacctggcgccttgatccgcttgccaggcatcatcatgttggtaccagggagtaccagtatgcgtggatttatggatgtagttgaacatcaaagcatccatgtgggccaggatgaattgctaagcgtaacgaatgtggtgatggcgcttgtggctggtttgctgtttggtaacctcctgataccgacacgtaagaacctgtagctacgtgccgaaaggacgcattctgcccatgtttaataggttgcattgttgttgacaatactttatttatatgctccccttgcgacaccccttagatattgagatatttgtcacataattttaatggggtaaagattaaagttacaaaatcatttggaaataaatgggttaaatagattatgcgtacgataaatgcggcagagatggaagaggtttcaggtggcgttttaggattggcagctgttgtttctcttatggtgcctgttgggagtgctgtagtggcaattgggactgctgtttctcaggtgtccgttttatataacacggttactgctgtctatgatgcttttaacagtttcatgaagggctttaatcaggggtacaataagaaatcttaattgtattcactaggtgtttttataaattttgaaatcattaaggagttaattaaaaatgcgtgagcttagtaaagtagaaattgagcaaatttccggtgcgggtgtatgggatgatcttggtagaaacgctggtaccgtctttcgttggtttacagatggtctaactctattatttagtaacgggttatcctcattatttactgcggctagtaaagtgattgcggctaatagggctaatgcaaatacaaaatattaagtgtattttttagaatttttagatttttttagaaatcattaaatcaatgtaggagtaaattaagatgcgtgagcttagtaaaatagaaatagaacaggtttctggtggatgtttgagtgaagtttttacgggtgtcaacacattatttacttggtttacaagcggtttgagatcattatttagtggtatttttggtgctgctactagttctgctactcctggtactactactcctggtactactactagttccactaattgaagtgatgtgttaggggttgtagaaaataatcttaaattcttaaggttgtaaaataaattttttaatcttgaaattgcatttgtagctttgttttggccccttcataatgaagtattgagggggcttttgtatgagcagtgcagcacagtagttgtattgtgtggtgtttccttcaacatggttgttggttgttggttgttggttgatcgagtggtatagcagcggattggtgtcatgccatgctgtgtggtcatcttcttgatgtttgcggattgaaacccattatttgattgctctttaattcatattaagttaaggattaaagtcatcttattgtctgattaatctcattattgtgcgaatggatgtttgaatcgttgtgtttatttagggaagtaatgcaaataatatatcaatgtattttatggatatgggtaggaaattgtcggggatgttcccggtcccaaggcgcaggggatgcgttaatcaaaggagtaagacaatgcgcatattatctgttagtgaggtttcagagatttcgggaggtaatgatctgactggacatcaattgggatgggcgcaggtgcttttgtgggagttatgggcggtcaatgtttcttggtgcatttgccggcgcagggggattgattggtgctgcctggggaggaggttggatggcgggaacgtttattcataaacagcttatatctatgtatcctactgttttttaaattattaaggagtaataatgatgaatatggatgaatggatgagctgtcaccttctgaaataatgcaaattgatggagctggttggacaagtagcatggctgaatttgtcgatacaggttctgttattgggacggtcataggttatgctacgatcagggaccctgattggtgcaggtcgaggcgggcttattggagcggctggtggattttctgcgggattaggttgggggattggaacatcgattcgtgagagaattatatatccttatgctaggatatattaatttttctctgtgaatgaatgatgttttgtgggtgccatgattttcggcacccacatttaagggtgataaaatgaacaagtttaaagcgataatgattggacttgatgattcttttgagtcgtttatttcatcagctcttttagaggaagggtgcagtaggctccggataaaaattgtttcatttattgtttctattcttatttttttatgcgttgtatttacggagatagatgttttttcattcggtgttggagggtgggtgatacttgggagtatttattcagcagttttactctccataaatcattattttgatagtaatttcaatccagatgggattttaaagaaaaatgaagcatccttctaataaggtcgttggttcctaattattggagcagaagtcaatctgtacggcttcaaatgttgcgatgacagatgggttaggtggccttgtttaaatgattattacggattttttaaaagcaatccccttatctgaggcgtggctttttcttttttattatcaaaaattataaaaatcagagaggcacctatatcacagctctgataagcatgatgctttacgagatcatctcttggggttgtatggtcaaaatgacaccctgaggttttctggcactctgtagcatcactgcttatcgatcttcaatgcaatatgacatgctttgccgcgaagcgatgcaagcttgtgagtgctggcactggtgagggtgaattcaggatggcagatatgtgcttttgctttcaggtgcgatcgcttagcggtgcgggtgttggtgattgtgcgttactgaactgttgttggaattccgtaaaaattggagcgctgaatttttggaatacttttagcgtttgttttaatcttgtccatcagtgttgctcaccgtgtcgtgagtgagtcagtagttaccctattgaatgcttgatagatcaagttgtctgggcgatgtgtcacggactgccgggtggtcacatggcatatgtatggcggctgggttgatggtgaactcctatggggtgaacatacttctagtgaatttaatcatttgcgctcgagggttgctcaaaggcagggggcttgcctgccatcatcgttgaatgcgctgatgatttgtctctcatctatgatgatcatgcagttgtttggcacatgtggtttcgaggggatgccctagctgcatctgccgaatgtgcgatgtctgtatgccactgggaacggtatgttcaggatgcgtgtttgagtccgaaaaatgtcaccgcgagaaaccaagcattggtgtggatatcaggtgctgttgttgtgattgtattggtctttcttttgacagtagattgccgaaagaaggaaggggattcactggggtaaaagctgtggtgattgaatactggaatcgcgcctattgcttacaatttttttgctgcatgacatatcagtgattgatgatgctttttccttgcttgcatcggggatgcattgttaatctaggccgctttagagttcttcattttgcctattttaaagccatccggcacatggatgtgcatcctacgtcttccaggattgatttttcagatgtccaagaagttgcgcggtatgttttctaatgatctgtccattgatttggggacagcaaataccttgatttacgtgcgggggcaagggatcgtgctgaacgagccatctgtggtggccgtgcgccaggatcgtgcaattggcggtactcgttcggtcgctgcagtgggtgtcgaagccaagcagatgttgggccgcactccaggtaatatcacaacgatccgtccgatgaaggatggtgtcatcgctgattttacctacaccgaagcgatgctgaagcacttcataaaaaaggtccacaaggcgcgtttcttgcgccccagtccacgtgtgctggtgtgtgtgccagccgggtccactcaggttgagcgtcgtgccatcaaggagtctgccgaggaggctggtgcacgtgatgtctatttgattgaggagccgatggccgcagcgatcggtgctgggatgccggtcaccgaggcgcgtggttcgatggtcatcgacattggcggcggtaccactgaagttgcggtgatctcgttgaatgggattgtgtactcacagtcggtgcgtatcggtggagatcgcttcgacgagtcgatcactaattatgtgcgtcgcaaccacgggatgctcattggtgaggcgactgctgagcggattaaattagaggttggatgcgcctatccgcaagttgaggtgcatgagttggagatttctggacgcaaccttgccgagggcgtaccgaaggtgatcaagatcaactctaatgaggtgttggaggcgctgcacgagccactctctgggattgtttcggcagtgaaatctgcgttggagcagactccaccggagttgtgcgccgatgttgccgagcgcggtatcgtcttgactggcggaggggcgttgttacgcgacctagatcggctgatttccgatgagactggcttatacgtgcaggtggctgatgatccgttgacgtgcgtggctcgtggtggtggccgtgcgttagagttggttgatatgcatggcaatgaattctttgcaccgtaatcagctggcatggtgatttcgtatgatccatacatgtttcgcacaggatcggggagatatcctccagcttgatttgcgctctcaggctaagatgcaggcctgagcgtgctgtacagggcaggataggtgccatagtggcggctctgtgtggttggtggcgttgtgagtcttaggtttttcgatcatgtggtttttctgtgccctcctatcccggtttttcattagcgtctcgttcgccagcagttgtcagcacaatacgtttgctgacttacttaactttggcaattgtgttggttgtgctcgacagtcgtggcgcctggttgtcgcagttgcgtcagcgggctaactggctggcgcagccggtgtgggcgctagctgggttgcctggttggtttggtggtcagctcagtgagcgtgcaatcagtaatgcgcgtttggttaacgagaaccgtcagttgcgcaatcagctgttgattgcgaatgcgcgtttgacccgattgcaaacggcagcacgtgacaatgcccagttgcgtgagttgcttaattttgctgagcatcacggtctggatgtgcagttggcgccgattctggatgttgatttggatccaactcggcagcgtcttgttctggatgccggcagccgcgatggtgtcagcgtcggtcaaacggtgattgatgctggcggtttaatggggcaggtgattgaggtgacgtcgctgcattcaattgtgctgctgttgaccgatccggatcacgctgtgccggtgactgtggcacgtaatggtgttcgcttgattgtttatgggcggggggatcgcttagagctgcgcaatattccgctgagttcaggtgtgaaaattggtgatgtccttattacttcagggctgggagggcgtttcccggctggtttcccggtgggcaatatttcagcactgcacctggatgatagccatgcttttctagttggggagatcacgccggcagccaagttggatcgtggtcgtaatgtactgttgttgcgcttgggtgcgtccatgtcacctggtggtggagggtcgttaacatcaagatctattattgactcaaacagtgagtctcactccaccaaccttggcgcttccagggtaatcaaggagccgcagcaatgacccggctgcgtaatacttggttattgccggtcagcgtgatattggccttgcttctggggttacttccgttaccagtgtcagtgcggccactccgtccttactggttagcgttggtgctgatgtactgggtgatcgagacgcctggtcgcgttggaatcggtttcgcttttgtaatgggtgtactggctgacttcctttatggtggtttgttaggggagcaggcgttgcgtctggtggtgatgtccttcatcgtgcaacgttttcgagcccgcctgcgcttcttcccgatgccgcagcaggcgttggtcatcggtggcttgctattcaacgattgtgtagttgctacggcgttgcatttgaccttgggtgagccattgttgtcctggagttattggtcggcaccgctattgggaatgttgttgtgggcaccgttgtttgtgttgctggatgcgttgcgactaggtcatgggagtcggaagtgatccgatgagcgtgcatcatccacaagccaagcatacgtatgccgaagttgagcagtttcgccgccgtgctttgctgagcttgtttgttgtagtggtgtgtctgtttggtttggttgcttggtacttcaaattgcaggtgctcgatcatgagatctatgcgactcgttctgacgccaatcggatcaaattgcatccagtcgtgccagggcgcggaatgatatatgaccgggacggacgccttttggcggataacgtgcctgcattccgattggacgtgatgccggataaggttgccgacatggaagtaatgcttgttgaactgggaaaggtgatcccgctttcagaggatgagctggagcgttttcaccgtgagcgtaaggtgcgtcgaagatttatgccggtgacattgaagctgcgcatgagtgaggaggagatggcgcgttttgcagtggatcggtggcgttttcctggtgtggagttggaaccctatttcactcgccgttatctttatagcgacttgtttgctcacgtgatcggctatgttggtcgtatcgacgaaaaggacttggagacgctgaacggtggggatgctgcgttgacctacatcggtaaatcgggcctggagcgctactacgagcaggtgttgcgtggcaagatcggttaccagcaaatcgaaacaaatgtgcaaggacgtgcgattcgcagtctgggacgggtaacggcacaagcgggtgccgacttgcggttgtcgattgacgctgacttgcagcgtgcgatggtcgctgcgtttggtcaatatgaaggtgcggcggtggcgatggatccacgcagcggggaaattctggggatggtgagtttacccagctacgatcccaatttatttgttaatggcatttctcatgctcaattcaatgcgcttaatgcgaatccttcgcggccgcagtttaaccgtttggtctctggcggtgtggctcctggttctacactcaaaccgttgattgcgttggctggattggataccggcgtgcgtcggcctgaggaccggattctttccaccggtatgttctacctgcccggtgtcaatcggggttggggagattcgcatcgtggtggtcatggttggactgatttgcgtaaatcgatcgcacagtcggttaatacttactactataaattagcgttggatctgggcattgagcgcttcaccgactacatgcgtcgctatggcctcggtcagctcaccggggtcgatttgaccggagagatcagcggtattctcccttccctagaatataagcgtaaggtgcgtaagcaggcttggtatcagggagatacggtcaatgtttcgattgggcagggagactggaaagtgactctgcttcagttagtacgtagcgttgctggcttggccagtggtcacatgaaccgcccgcacttggtggtggccgagcgtaccgccttcagccagccgtggcaggtgttgccgcaaccgccatcacagccaattagcccgaacccggggcatgtgcaggtggtacgtgaagggatgatagacaccatgcgtcctggagggaccggctaccaagctgcgattggtgcaccttattcgattgctggcaaaacaggtactgcccaagttgccagccgtaagggggaggctgccgttgatccgcgcaacttaccaatgcatttgcgtcatcgtgcgttattcgttggttttgctcctgctgataatccgacgattgcggttgcggttgcggtcgagggcggcgggtatggtgctagcactgctgcacccattgcacgcaagatttttgatgcttggttgctaggcaagttgccagagggcttggagcctttggacagtgcgcgaggtcgtaccgcgattggtttgactcagtttgatatgactgttgccggggtatgcgaagctggaaaccgtgctgccttgcaactgggagaactacaggtttcggttgctggtggaatgctaaattcaaccgccatgatgccggttgcgccacgtgcgccagtgactctcgactcattgccggaggaagacccttgagggatttgctgcgcttgcttgtggatctggtgttgcgctttacgcgcactctggatttgccgctgtgcttgactcttggggcattgatggtgattggactgatggtgatgcatagtgctggtgcggcggtcactggcaccagtcacttgatgttgtcgcagagtgcgcgttttgcgtttggtctggtgatcatgtggtgcttgtcacgggttccagtgccccgtcttcgtgcttggagtccattggtgtatgtgttctcgatggtgccgttgatggtggtattcatactgggtaccggaaaatatgggcgccagtggttggacctgaagctattttatttgcagcctgctgagctgttgaaaatcagtttgccaatgatgatggcttggtaccttcatcgtatgccactgccgccacgtctgtttacggtgatggtcagtttcatgattattggtattccgacctcactcatcatgttgcagccagattttggtaccagtgtgctggttgccgcctctggtgtatttgtgttgttgctggctggcttgccgtggtggtggattggaatcggcgtcgttagtattgctatgattgcaccgttcagttggttctggttgctgcgtccgtatcaaaaggatcgcatcatgatgtttctgaatccggagaacgacacacttggtgcgggttggaacattattcaatctaagattgcgattggctcgggggggctggccggtaaggggtggggccttgggacgcagtcacatctgaactttattccggagcagacgactgactttgcgttttcagtattgagtgaagagtttggttgggttggtgtgacgacggtgctgatgttgtatttgttcgtcatcatgcgctgcttgtggatcgctgggcaagcacgcgatacttattctcgcttgcttgttagcgcgcttgctttgtctttttttgtctatgtgttggttaacggtggcatgatttcaggcttactacctgtggtgggtgtaccaatgccactgatgagttatggcggtacttcggcggtttctttactggttggtttcggtttggtgatgggggtgcgttcgcatcggagaatgcatcatcgttgagcattgtgatgagggaaaaagttagctatgtctatccagcctttgggtacgttagtccctctttataatcccaagcctgcagaacaagtggttctgtgttgaaaaagtccgattttcattacgatttacctgaggagctgattgctcaagggcctttgccggaacgttcagccagtcgcctgatgcttgtgccgtcggccccagagcaatttcaggattgttatgttcgcgatttgccggaattgctgcagcctggtgatttgctggtgttcaacgatacccgagtaatcccagcgcgattgtttggtaggaaggtgagcggtggtcgggttgaaatcctgattgagcgctttcttggtacccatcaggcagtggtgcagttgcgtaccagcaggtcgctcaaagtgggaaacagaattttgttggatgcgggcggtcatgctggggtgcttggtcgtgatggtgatttctatttattgagtttcgatgttgagtcacctttggaacaatggttatcggatgtcggtcagttgccattgccaccttatattcatcgtgaacctgatgaatatgatcgtgaacgttatcaaacagtgtttgcacgcgcagtgggtgcagttgcggcacctactgctggtttgcattttgacgagtcgttgttggcacggctgcgtgcacgtggggtagaatttggctatatcaccctgcatgtaggagcgggtacgtttcagccagtgcgggtagcgttgctgcaacagcatgtgatgcacagtgaatggttcaaggttggcgctgaattagttgagcaagtgcgtagtgcccgtgcgcggggcggtcgagtcattgccgttggtacgactgtggtgcgctcattggaaagtgcgatgcgtcatggggagctgcaaccatttgttggtgagactcagatctttatttttcccggttattgcatccgtagcgtggatgcaatggtgactaactttcatttgcctgagagtacgttgttgatgctggttgccgcttttgcgggacgtacgcggattcttgatgcttactatcatgcagtgcagcagcgttaccgttttttcagctacggtgacgcgatgttattgttcccacgtaatgctggtgagcaatagtcttgcttagttatttcattgcattgatcggagatgacgtcatgctgtaatgagctgcgattgctgcgtaaatcatgtggtgcatccggtggcggcatcggtttttttaggcttcctggattgcccaatgtttgatgcggctgaccttaattgttggcaatgatccagtggttgatgcggtgtaaggcgtggtctgcaggtgcaacgtgtttccttggatcttttatgatctgtgtgtatcaatggtggactcggtaggcatcaagagcaataagatttagtggatgcccggtgcataggtgatgtttgttatctcgtctgtggtatgaggcactgcggttgcattgaatagcttcgttcagtggattgacgatgcgtttcagtgacacattttgatgtgatccacctgtaccctcacagccgagtaacggttgctgcagaggtgatcgagaatgagggatgtgcgagcacaacatgattggattgactgtgttggggagactctggatcgtctgctctattctgatccagcgtattaacttgcccatggtgtgctggagtcccttactaaggggaatgaatgaaactgccattcaagaacaggatgcattctttaaaatcagtattgtgcagtaggtttaacccaaggctgactattcgtttatgcgatcttaaaaagcctgtctttcaaggcggagatggcgcacacattggatgggtagtttgttgtgaatgtctcattatttcctcaagaactggatgtcttactgcggcgctccggggtatctgcactgaatcccgaattgtgtcaggggttagtgcaagcgtgccaggcattgccttctgaagctgggcagcaggcggcctggccggtgttgctagatatgttggatgcactggtggtgttgtcggcggatgaaacgttactgattgcagcgttgttgtttgatctgccaatgctacgtccaatgttgccggtgttgccgtggcgttcgagtacgcatcagcaaatggtcgggagtttgcttgatggccaggatgcagcggaacaagtgtggacgttgcatcctggatgtgcggctggacgtaatggtgaggggttgcgtcggctgttgctggcgcttgtgcatgatctgcgtgtggtgccgattttacttgcccgacagttggctaagatgcgtgctgcaggtgtgttgcttgagtcgcagcgacgtgcgttggcgcaattgacccgtgatatccatgcgccgttggctaaccggcttggtatttggcagttgaagtgggaattggaagatctggcgttccgttacttggagtcagagatctatcggagtatcgcgtctgccttggatgaatcccgtgttgcgcgtgagcgctatatcagtgtgattgctatggagttatcgcgggtgcttgctgagcatggtgtgtgtgctgaggtcagtgggcgtccgaaacacatttacagtatttggagaaagatgcagaagaagcggttgcatttcgaacaggtgtacgacttgcaggcggttcgtgtgatggttgaggacatggccgcgtgttatgccgctcttggagtggtgcatgcgttgtgggcaccggtgcctggtgagtttgatgattacatcgcgcggcccaaggagaatgattaccgctcactacacacggcagtgttgggaccggaagggcgtactgtagaagtacaaatccgcacgcacgaaatgcacgcgcacgctgaattgggtgtggctgcgcactggaaatacaaagagggtggcaaaggtgcggaaagggattttgatcgcaagatcgtctggatgcggcagttattggagcaagctcaagagggtgagtccggcgaggtggtggaggccttggatgctgagttgctagaggatcgggtttacgcgttaactcctaaaggcgaggtgattgatgtaccgcagggggcgacgccactagactttgcttatcacgtgcataccatggtcggtcattgttgccgaggggcaaaagtgaatggccgcattgtgccattgacttaccgtttgcgaagtggtgatcgtgtggagattttgacggcgaaggaagccaatccgcatcgtgattggttacttcgggcgaatggtttcctcgccagtcgccgttctcgtgacaaggtgagggcttggttcaataagatcgaacgggcgcgtaacgtgcaggtgggaaaggagtcactggagcgtgagctcaaacgggtgggacagcagcacgtggatcttagtcctatcgcgcggcgtttccatgccgatagtgtggacgatttgtacgtccagattgcgcttggcgatattgggccaaatcaagtaagccgtgctttgctggagactgagcgtgttgttgcatttgcgccgctcgcgcggccgagcaagaagcgtcacggtctaagcaaatcgatgttcactgtgcagggggtcagcaatatattggtgcagctggcgcgttgttgtcagccggtgtgtggtgagccgatcgccggttacttgactctaagccgtggggtgacggtacatcgtgctgattgtgctgtattgatgcgcttgaatgccatgcatccgcagcgggtgttattggttgaatggggcagtcaactcagcggtagttatgaggttgagattttggtgcgtgcggtaaaccggcgttggttgttgaaggacatcgccgatgtgattgcacaagaggatgcgcatatgttggaaatgagtagtgatgcgtttcgagacagtggttatcttcaatttcgggtacggctcaggctgagtcatcaccggcaattggcggcgttgttgggtaaattggatggcctctccggtgtcaatgaagtgcggaggatgggctgatcgcagcgtatatgtccgctacagtagggcatgtatatcactgtcgttacgaggtttatgcttggagtgttgagtgtcattgttcactgtcaggtccgttcgcgcatgtgtattttgttgcggcgctgctcggtttggcatgtgttgtcgattgggacactattgcttggtgtggcagtgttggtgttgagcaaatttttggctgattgggcttggccggatagcaggatcacgcagttgttacagcgtggtgaggtggcgcttgctcaggggaatctgagtgcgccggatggcagtggcgcgcgtgagttgtttgagaccgccaaagcactggatagtgatcgtcatgaggctcaggacggtttgttgcgtaccggacaggctgcgttagcgcaggcacggatcacgtttgatcgtggtcagtttgatgcggctgaacgttatttgcgtttggcgcgggtgttgcagatgccgcagaatcaggttgatgtgttggagcgtttagtgcgccagcgtcaagccgagcatgctgatcttgatcaattgctggttcgtgctgatgaggcttatgtcgctggacgtctagagggtgatccaaacagtgcgctaccgttgtatcagcgagtgttggagttggtgccggggtttactcgtgctttggaaggacgtgaggatgccttgtctgaattgttgcgccaagcgtgcgttgatttggaacgtggccagttggatgctgcggctgccaaactcaatgttgcgcagcgttacgatccaggccacgtggatttgccgcagacgcaggacttattcaaccgcgctatagatgtacatctgcaccgtgcggttcgattattgcggcgtggccggttggcgccagcggctcgagactttggggcagtgttggcagtgcgtcctgagcagagcgcggcgcggcgcggattggaggatgtggtggagcgatatgtggcgcatgctgggcaccaggtggctgaattccatttcgagcaggctgagttgtcgttagcgcgcgcgcgcgcgctgttgcctggtcaaggctcgatctatctggctgagcaggcgttgcaacgtgcccgtcaaactcggctctcattacagccaaaattatccaaagttgagcgcgagcggtatttgggtgaattgatggggcgttttgatgtggccgagcgtcggaaggagtggctgactccgcccggtatcagtgcttatgatcaggtacgtgctgcgcaagcgattgcacccgcagatgcacgtgtgcagagggctgcacaacgcctgctagtggcgatgcgtgcctgttttgaagaggagcttggccgcaatcggttgcagagtgctcaggcatgccttgatgtttggcaggcgattaatggtcaggatgcggggttgctgggggccagaaagcgcttggcgcagcgttggattgcggttggaagtgagcgttttggtgagggcgatattactttcgcgcgccgtgctttagagcaggcgcgacgttgggggtcacgtactccggagttggatgaattagcgcggcgcgttgatcttgcttcgcagcgttgaggtgtgagcaagagtctcccagtggtctggtcgttgttcctgtgtgaggtgtttgatgagtgattcaatcttctgagcgggttggatctaagcggcactttccctggctgagttgattgctcttggtggaatatggggtatttgcatcccaatccagtttacttggcgtgatacttgcgacccaatcgctctttagtactgtcgctgtcatgttttgtgtcgctgcgtgtacttacttcgtttgggttactgtctttttgttgtgaaggtttgtatgaaggcctgcgttccatgcgatgaaatgtttattttttccatatctgttatctgtgcggtgttcaggcgtgcaatacctgcctaagtgcgggtgtttggtgatcttctgtcgatggattccgcctgtagtgctatagcacattgttgcagcgggtgtgcttgcgttgtatgcacatcctgtgagttactgaggatggcggtgtgtgatggaggatggatgtgtgttcgatctgctgtactgaaatttatggggtaagtaagcctcttgcttttagccagtcgcgtgcattttccgcatcttgttcgaaccatgcccgcgttgacccaaggcggtagctatatccccaagcatccatatcctgcatgagccggtcgcggtcgatcccgggaagtgcatcggccagcactatttgtaaatagcaggtggcgtcttcttcttcgcttgaattggttgcgttggtatgcaccgttgcgcgctgttccggtgggagtacgatcaggtggcatgcttcatgcagcattgagtgcacgggcgtgtcgttacgcacgtagacgttacaaccaatgatgccagcctctggttcgccccagtagctgccagggattggcgctccatcttcgatgaggtgcaagtgcaggccataacgtgcaagcagctctaaggcatcttccggaacaatgtgtccgatgcgaactacattctccagtgcgttgggggtggtttgagatgtggttaatgtggaaggcatcaatgagtttgggagaaacgggcaggctcagcggtatttgttgaagtaggacgctgcttggttcagcgctctgaatcgtcggggagtgcgacggatatatcgagcacgtcgttggcaccgtctttgattaagtcaactttcactgcatcggcatcaatctttacgtactttttgatgacttctagcagttcgcgctgtagcagtggcaggtagtcggggccaccgcgttgtgtgcgttcctgggcaataataatttgcaggcggttctttgctgtttctgcggttttcgttttatttctgagaaaatcgatcagacccatacttaacccccaaacagcttactgaagaagccctttttttctaccgtggtgaagcgcattggatgatcttcacccaggatgcggcccacggcatcttcgtaggctaggccggctaaggagttgttgtccagaatcacgggttcacctttattggaggcattaagcacatcgcctgattcggggatgacgccgattgcttttagtccgagcacttcttctacgtcagcaatgctgagcatctcgccactttctacacgtgctgggctataacgggtcagtagcagtgtagtgatgatgctgccaccggtttcggctttcttggttttggagtcgagcagaccaatgatgcgatctgagtcgcgcacggaggatacttccgggtttacgacgacgacggcacggtcggcaaagtacatcgctagagaggcgcccttctcaataccagctggagagtcgcagcagatgtagtcgaagccttctgcttgcagctcgttgagcactttctccaccccctccttagtcaacgcgtctttgtcgcgggtttgggcggcggcgagtagataaaggttgtcgaagcgcttgtctttgatgagtgcttgcttgagtgtagcttcgccatctatcacgttgacaaagtcgtacaccacgcggcgttcgcagcccatgatgaggtcaaggttgcgaagtccaacgtcaaaatcaatgactacaacttttttgccgcgtcgtgccaatccgcaggccaagcttgcactggtagtcgttttgccaacgccgcccttgccggaagtgattacgataatttcagccaaaggacttctcctgatacgttctgtggtgaggctgcgtcaatccaacgcagcaattttgatctgattttgttccagccagacttggacagctttaccacgtagttccgtggggatgtcgtctagtaccttgtatcggcctgcaattgcgatcagttctgcttgaaagtcgcggcaaaatattcgcatttcggcattaccccgagcacccgccattgcacgaccgcgcagcgtcccataaatgtggatgttaccgtcggcgatgacttcggcacctgcgccgactgtattcaggatggttaaatcgcagtgctctgcatacagttgttgaccggagcgcacggtagtgtgttgtattcggccagtgtttataggtggcgttgattggggtggtggagcggctacttcttggcgttcgtaatgagcacggaacttggacagtagaggtagtccaagttgttgcgataagaggtcaatttcattggtcccataggcaatggccacgggcagcacgttggctgcgcgcaagccttccaccagtgcttttgcagtggtcaggtccggagtgtgcgggagttcgccgaagtccaggatcacggcagtgcgtctgaagagcttgggggcgcgcgtgactcggtcagacatttcttgaatcaggcgtggtacgttcagagtacggatgcgcaaagtggcgatacccacttggccgattttcagttcgccggcttgctcgaagtccatgttcacattcgacatgatttgcttctccgcctagttgggtgtgccgatatggcgttgcaggcctacccaggggaggttcggaagtttgtcaccgtaggtttcttggatccaggggtagctgcacatctttttcattagcatgctggcgcgtacatcaatgtccgtcattgtgttttgtccgacttcgtggaaaccaaagctgccgtggaacaacaatgctgcttcggcaccgtggtccagaaagacctcgcatgtcagataggggtagcgcaactcggcgtagctgtgtacgtcggcataaaatgcccgtccgacgccacccccacgacgacgactcgcgacgacgatacggtcgatatagaaaaagttctcgtagtgctctcggaaccacgtaaaattactactgctatggcggcttgagctaccaaagccgaccaaaaaaccagccaaattgccgtcgcgttcggcgacacggaaatagtcagcctctttgtagaaacgataaagcgcagagagatctagtggtaagatcgctaatccggcttcattgttcagagtcagtacggcatcgagttcagactcacgcacgtcgcggatgaggatcggcattgagactccgtagtgtagcgtggtcaatctgcatgctggaggctagattcctgcatttatcgcaaattatgccatgcgtggctttagcgtggtacgcagtagatgataatcatgcgtctgaacttggaagtcagtgggtactctttgccggtgaatcatcggtatcaggaatatctgccccatgcgcatcgtttttagtgaatttttcctggttggttgtgtgtcatgcggccgatgttgctatccatggtgacgtagtatcgttgcttgagattgtttagggtgaactttcagtgcgatcttgctcagtaggtagctgaacatctagtgtgaagcctgctacgatgcgaacttgagattaaattaacccggccgtggcatcaggtctccggagattgctgaatgattcgttcccgtatcaccgagtttctaatagctttgggaatggtagctgttttatttcttgttattgggtttgtcttaccggcgcaacggcatatgtccgaaagtattgggactaaccgtaatgcgactatcgtgtacgacacggtaaacagttttcgtcgcttcaaagattggaatccgttgttgttgcgtgatcccaaacttcagatcaacttggttggtccggagtccggtaaaggggcccgtgttgagtacagttccaatcagaaagacatcggtagcggtagctgggaaatcatcaacagcatgaagaatgagcgtgttgagattgcaatccaggatgcaaccagaggttatgacaaggtgaccacgtttaccttgaagcctagtggtaagaacaaccggaatatccaaatcacccaggactacaacgtcaaatacggattcaacctgtttggtcgctatgctggtctgtatgtgagccgcaatgtgggtgagcatttaaaggtgggtttgttacgtttgtctaacattctggccagcgtgccaaacgtcgattaccgtgctgagatggatggcaagttgaccgtgaccaatctgagaattgtcgatgtgcctcctgaaaatctgttggttgtcaacgcagggaatattgaccgtcaaaacgatactattaagaagtcaattaaagataaccaggaatggattaagcgtgttatggatgcgaatggcttggagccatctgccccaatccgtattgtcacgactgattttgctcagcagaaatatgcgtttgatgtagttcagccggtgcgtaagaaggttgagagcaaacccggtgggaccaagtccaagacagatagtaaagaaaagaagcctcaaaagaatgtggttgataaggataaggtagttcatgtggccactgtttccgcagatggcacgctgaaagtcgctatctctgccggtgctccggtcaaatacgtacataccaaaccgcgccgtgctgcttctgcctcttacaccgggcatatggcgggattggatgctgcccgtaatgcattgcgtgcatgggctgttacctcaggctacgaggtaattgaccgtccctacgagtcctggaagggtggggtggacaaggcgtttacccaagagggaagctacgacctgtattgggtggttaagtgattcctttcaacgccatgtcgtgatgttgttggaacgtgccgccttgcgcggcacgttctttcaacccttctatctgctgttatacgttcagttgcttgccgcagtgacagaggaacattaaaagccattgcgcaacgtgttttcctccaacggtgccgttttggttatttgttccttctggatcatgctccctgatatggactgctttggcttgcattgccaattgcagtgcagccttgctgtgttccagaggcgtgttggcaggtgcgttgttgcaggtcttgactccgatagctcagtgctgctggatcgtgatgatgacaggcaagatactgctggttattgatacattgaggcgctgaagtgcatggcttggtacccacgtggtttcgatgttgtggcagcctatgatcatctttaccactgcgaccctgggttgtcggggtggatgcagcgtctgggtccgttgccagctctgcggggctggcgtcagccgttcaacgtagttgatgctctggccagagcgatcctgttccagcaactgagtggtaaagcggcttcaaccattgttgctcgtattgaggctgtgattggtagcgcctgcttatatgccgaaacacttgcgtgtattgatgatgcgtgcttgcgcacctgcggtgtctccagcaacaagattctggcgttacgcgatctgacgcggcgtgaagtggcaggcgagcttcccagtgtgcggcagatggggtcaatgcaccataacaccatcgttgaaaaattaattccgattcgtggtattggtcgttggactgtggagatgatgctgatgttccgtcttggccgtcccgatgtgctgccggtggatgatttaggggtacgcaagggtatccagcgtgtggatagccttgctttcgtcccgaccccgaaggcgctatgtacccgaggcgaatgctgggcaccttaccgcacctatgccgggttatatctatggcggattgccgacttccatgaaggagaaggagcggtgatctctgatcgttcgcaggacgagtagtgagcggccagccttcggttctagacactgctcagcagtggaatgcgtcgttgggtaatcaaattagggcaggaatggtttcgcgtttaaatgcttccatagatgggtaacgctcattttattgatcccttgcaggtcaattggagtacgacgacttcttgattagaaaacattcataccgtgtctgcggatgcaggtgcagagtggtgctatgtgattgtcttgaatccgggctggctgtgcgatgcagtgtcgctatggcaatgtgtttctggtgtgtcgcacataaaagaacggcggacccgacgaggcagtccgccgcttgagggcatgtagcgagccttacttggccttgaatacgaccttggtgctgattgcggtttcgtttggaatgattttgatgtcagcccaatcaccgcttcctataccgaaatccagccgattaacagtggctttgccattaagaacaggttgtgtgcccggtgtccaggtaaaggtcagtgtgaccggtttagtcatgccgtgcagctctaatgtgccatcggtggcgtacttgtcatgacccagagcatgaaacttgctggcttgatagtgcccagttgcgaacttgcttacgttgaaaaaatctgcactttgcagggttgcgtcacggtccttatcgccggtcttggcatgagtcagcggaatagtcacgtccaggtgtgccttggagaggtcgttcgggtcgaaactcatttgggtgtagaacccagggaatgtgcccgtgaatactttgccatcgtatttattggaaaataccaagatcgaaccggaggtttgcacgtagtcagttgcgcctgccggggggactatgcagcagccaatcaccagggcggcggcggttagcacggtaagaaaagaccctttgaacatagatgactcctttctccttaggatttcgacgagaaccagttgcgtggcagcatccttgccagggtggcgtcccgttggatgagatgatggtagaaagcagcgccggcatgcaagacgactaagccgatgagtgcccagaagctgagtttatggatctccagggcgactccacgtatcgtttcgtttggcgacaccaacgcgggcatttcaaacaaaccaaaccagtagaacgtgcgcagaccacgggctgaatcgtacagccaaccggccagtgggatagtgaaaataagtacgtagagcatgatatgagtggcattggcgactcgctcctgccagacaggcgggcccgcgattggtttgggagcgccgacatacagacgccaaagcagacgtaataccgccagtgccagcacgctgatgcctgttgatttgtgtgcggtatacacccaaaaataattcggagttttaggcaggttgcccataatgaggccgccaatccctaagcctaggattagcaccgcaatcagccagtgcagcgcttggctcatccagtcccatcgttcagcagtgcccttcagcgtcatgaccagctccccttacggtagctcatttgtttttttgcctgtatctgttttgtgtagtgttgcatctgattcctttgtattgcttgatgttgtcgtgtcctgatggacggtttgctccgttgtttcctttttgatgcctccttgacgcaccgcttcaacttcaatacgcagttgtacttcatccccgatcattgatttccatgcattgatgccgaacacggaacggctgagtgtggtgttagccgagaagccggcagtacgccggaacggaggcaaaggatgacgttttatcccatacagtgtgatgtccaataccacctcgcgggtgatcccatgcagggtgagttggccgatggcttgcccgttggatggactggtggcggtgacttgggtagagacgaagtgtgcttctggatagtgtgcggtatcgagcaatccttgcgccaaagtggctttgttccacttggcatcgcccaggtccacacgctgcaacggtatgcgcacgtccagttgtgcgttagaccagttgtccggatcgaagtcaagagtgccggtgctcccagacaccgtgccaagggcttttgagatgcccgcgtggtcgatcacgaacatgatcctggtatgcactgggtccagtacatagcgcgttgtggccgccgtgcctacaagcggcacagtgagcaataaggcaagcaacatcaaggtgacacggaacatacccccgattttagctatatttctccagctgtgtgctgcggcttgcgtctgcaacgatccgttgcgagtatgtcaatgaatagggaaagtgagatagctggatgcggtgtttgaagagggtgcggggggcgctgctgacggcgctgcttgttttggtatcactgttgacagccacagcggcggtgccggagatgcctcgcttccgtgtgcttgatgccacgagcggattgccgtccaacgtggtgcgggcaatgctccaggatgctgctggttatttgtggttggctacgagtgatgggctggcgcgctatgacggcaccgcattcaaggtgtggcggcatgatcctaatgattcaggctcattgccgggcgactccgtcctggctttgtatattgatgtacaggataggatttgggtgttgtctgagaatgccgggcttgctgtgcttgatgcgcagcgccgtcgcttcatccaggttccggtgggttcggttgctaaaaccgacgccttacatacgctgaccggccatggcgatgcgatctggctgagtgatctacatgcttcggtcatacggattgatagcgcaggagcactcacccgttatgcgctggctgatgtttcgccgaccctgaaggataccccggttgtcgcgttgacctttgatgccaatggacgactgtgggtgggcacgcctgatggcctactgtatttcgaggcgggacgcttgcatttggcgccgccgcctttggataaagcctcgattcattccattgctgccgtgggtagccgactgtgggttggcagtacggatggcgtgtatcttcaggatgctgaaggacgttggcgtgcgccgaactgggggccaatgtttgcttccggcaatctactcttgtctgtggctgatgctggtgacggtgaattttggctgggtagtgagcgtggtttgtggcgtactcgacaagagcgaccaccagtacagatccctttgagtgacatgcatcacggtgtgtccaccgtctcgtccttgtggcgtgatacgagtggtggactgtgggtaccggtttatggtcgtggtctaggctatttgcgccaggattggaagcgaatggcggtcgtgcgaccgagtgatggtggtgaaagtgcctattgcaatgttgccccggcggcgtattccggtggactttggcaattgaatcgtattggagagttgatgcatctgaataccagcaccggtgagctggtacacacaggatggcagcgtcatgagctgcgtggcatgaacattaccaccacattggaggacagccgtggccggttgtggctggcaaacatgcaaaatggtttatcgcgcctggatctgaaaaacggccagtggcgtgagtgggctgcacatgaagatgacgcggtcccgctgtatggtcctatctcttggatcgtggaaatgcctgatagcagcctttggctggaagcgttgggcgtgctgcagcagcgggatcttgaaagcggacgtgtgttaaatcagattgtaccgggcagtcatggcctggatggttcccgcgtcgaacagatcggccttggcccagatgggcgtttgtggctggctgctggtagtggcgtgtatgcctgggagtcacagcgtcgtatgttcgtccccatatccgatttgacaggaacacgtgcctatagttttgtcccggtgggaggcaatgaagtttgggtgcatcggttacggggcttggagcaatggcggcacagtagtcacggttggaaacgggttgctttagtgggaccacagcatgggctgcctgccatggagtcgctagggatgcagcatgacgcacagggccgtatttggttgtccacacgccgcggcctatggcgtatcgacaatactgatgagctgcaggtgcgtaatttcggtttgcgtgatggtttgggtacccaggagtttgctgaggcctgcttgtggatggctccggatggcgtattggttggcggcactaccgatggttacttgatgctgtttgatactgcgatgcctgacccagccccatttgtaccgcagctgcgtatggagaccgtcagtgtgatccgtgctgggcgccgtattgatttgccggttgatcagcctttcgaactgctgccgaatgatcgccaactgattgtcggcgcgcggttgctttccttcggtgatccactgtccaaccgctacagttattggttgaaaggtttcgataccgggtggattgatcaggggagtagcggtacacgggaattctcctcgttgcccccggctgactacacattattgattcagggcaccgacccgatgggcaatctgtcgcgcatccatctggtgacgtttcgcgtattgccgccctggtggcgcagtgcgtgggggatgagcgtattaacggggagcggattgctattgctctggggcgttgcatggaactatcaccgccgtttacggcgtcgtgcctgcttacagctggaacaacatcagcgcgaagttgccgagcgggcctcactggctaaaacacagtttttggcgacgttgggtcacgaagtacgcaccccgatgaccggagtgcttgggatgagcgaattgttattggaaacaccgcttgatacgcgccagcatggctatgcgacctcgatccaagcggcaggtaagcacctattgcgtttggtcaatgatgccctggatctggccaaaatcgaggctggaaaactatcgttggaacggcgtgattttgattttcatgccttgttggaacaggtggtggcaatgatccggccgatggtggagcgtaaaggattgcgttttgtctatcgactggatccagaggtgccccagtatgtccatggggatactgatcgactacagcaaattttgctcaacctgttgatcaacgccaccaaatttaccgagcacggcgaggttgtattacaggtcgcgcctgggcaggaacaagcctgccttggtgtgcgtattgacgtggccgataccggccctgggttgagtgaagaacaatgccagcgcttattccgtcgttttgagcaagtcaatggtgcatccaccgcagcccgctatggtggcagcggacttggtttggccatttgccgcgagttggctaccgtgatggagggggagatccacgtagatagcgagcttggcaaaggcacctgcttccgtgttctgcttcctcttccatgggtgttggcggtgcaacatgcggttgccgtcatggatgcggaaccctcaccctgctccaatccgttgcacttgctactgattgaggacgatccgacagtggccgaggtgatcgttgaactgttgcgtgtccgtgggcatcgggtgactcacgctttacatgggttggaggccttggtggaggtgacgctgacacgttttgatgcctgtttatgcgatctggatctcccgggattggatggtgccggattgattgtgcaactgcgggcacaggggcagttctttccaatcgtcgtggtcactgcgcgtactgatgccgatgcccagaggcaggcgttgcaggttggatgcgatgcgtttttacgcaaaccggtcaccggtgagatgctggagcaggtgctcacccaggtgctgagtgcgcctcgtcaagaggctgatgtggatacgccaaaaaaaggaatggaatgggaaggcccaggatcagtgactcgataaagcgcgatttgcgatgatgctcccacgtgtcctcgcgttgatacgtagggatgatgaagtcgccattgttcattttttggccaaaagttccacggaataaatactccgtgagataaaactcgatccttggggaaagtgcgacgatttgagcgtctgcgtttaaaccttcttcctcggacttgataacagtccttcctttttgcttttccatggcgtgtcgtttgcgtattgcttggtgtgtcgttctgatgctcttacagtgggggcaggcgatacatcatctctagtgtgaccagtcgccgcatggcgtctggtcgcgtgattaaatcgtcctgcgctttgcgtcagcgatggatgtgatcgagtgatagtttcgagtatggtgacttgcttgaaagcgatacatttccgtgcttgcgcatgctttggtaaacgttgtttcctctattcagaggtatcaatagcaatgttctttttgctaggcccgtggcatttctgcccctgtggcaggccttgcgtctgagtgatttccgattagttcattccaccccgtcatcggagtcatcccagacgctatctcaacggtgtgttgttttacgcatcaaaacccttgcctgattccgtcgtatgccagttgccagcgatgcctagggcgtgccgtttttttgaatagcatccgggctgacagcggtccacgtttgttagacatagacataatgcaagggacagagatcactccagtcaacgacggctcaagcgctgcacggcttcgacaagcgcgctgacgtgatccgggtccatgccaggggtcatgccgtgaccaaggttgaagacatgtccctcgcgtgagccaccgttaccggctgcgtagctgtctagggtgcgttgtacttcatgcgcgatgttgtttggggttccgtacagtgtggctgggtcgaggttcccttgtaatgccacttggccgttgctacggcgtgcggcgtcttctaattcgatggtccagtccacgccgacggcttcggtaccgctcatggcgagttctgcgatgtagggtccgttgcctttgccgaacaacaccaggggggtacgttcggtaccggtgccgcgttctagttcgcgtgcaatccgcgttaagtagggcagcgagaatgttcggtacatcgtgggcgacaggatgcctccccaggtatcgaagacctgtagtgcttgtgcgccagcggcgcgctgtgccgccaagtagctgatcactgcgttggtgacggtgtttagcagttgatgtagtacgtccggtgcgttgaatgccatggccttaatgtgtgcgtattctttgctgcttcctccttcgatcatgtagcaggccagtgtccatgggctgccggagaaaccaatgagcgggacgctgttgtccagttctttacggatcagtcgcacggcgtccatgacgtagcgtagttcggtttccatatccggcacggcgagttgtgtgatggctgcggcgtcgcggattggtttgcccaagcgtggcccttcaccttcaatgaagtgcagttctaggcccatcgcgtcggggatcatgaggatgtcggagaacagaatcgccgcgtctagtgggaagcggtgcagtggttgcagggtgatttcacaggcgagttcaggagtttttgccatcttgaggaagctgccggcgtgttgccggacagcacggtattccggcagatagcgtccggcctggcgcatcagccagattggggtacggtccacggtgtcgcgttgtagggcgcgcagtaggcgatcgtttttgagcatggagactctctgtgtgatgcgttggaatgacgggtgagtatgacagtggtgtttgaggtgagcgttgtcggttgttgcgtcttgtcaaacacgtgctgtgcggtgtttcaagtcagggatggtacagcggctgcagttggaggcatgggccgatctggaggttctgttgtaaccgtttctaacgttccaatagatcaggttacgcagggtgtcggagaaaatgggatcgtttggtgtcggtaaaggggtgttgcaagggtgtacgcatggcgagcgattgtcgttgttgtggggatgcatctggtgggttggggtgtcagtgatggtgttgtgcatcaatgggggcgtcggtttggtggcttggtggtcgcatgctgatgggggctgtaggtcgtatgttgattggttgagttggccaggatctgtcgcacggttgcttcatcaacgtcggagacggcttcggcgtggccaatgccgcgccataggaccaagcgtaagcgaccggcaatgttttttttgtccaggcgcatacgctccaggagcatttcaggtgttagacccgagggcaggacagtgggcaagccgtaggcatccagtaggtttttcagcgtctcggtgtcttgtgcgggtgccagacttaatgcgtttgacaagcgtgcggcaagtaccatgccgacggcgacggcttcaccgtggttgaggttgttgcttcctggtgtgctgtagccctgtgctgtttcgatggcgtggccgaaggtatggccgagattgagcaggacgcgttcccctttttccagtgggtcacgtccgacaatatcggctttgtgttcgcagctacgtgcgattgcttgggccagtgcggcggggtcacgtgctagaagtgcttcgcgtgtggtttggagccagtggaagaatacggggtcgcggattgcgccgtatttgatgacttcgctcagaccagcgcgtagttcgcgtagcgggagtgtggcaagagtgtcggtgtcggcgatcactgcacgtggcggatggaaggcgccaaccatgtttttaccctgggggatgtccacggcggttttgccgccgacggaagagtcgaccatcgccaataaggtggttggcacttgtacgtagtcgatgccacgcatccagcaggcggcggtaaagcctgccagatctccgatgacgccgccgccgagtgcaaagaggcaggcatcacgcgtggcgccgagtgtggcgagttgggcgattgcggcgctgaagttttctagggacttggatgtttcgccggctggcagggtgaatacgttgaggtgtagatcggggcgtgcgcgcagtagcgtttcctgcagttgtgcggcataacggggggcgacttcagaatcactgagaataagtgcatgtcgaccgcggatggtggcggccaggcgtagaggatcgtgcaataggccgggaccaatggcgatggtataggggtaggtgttgttgacggtgacgctgcgtagtggtgtgagagtggtcatgcggcgttgcttgatttctgccagtgggctgttaagtccagaatgagctgggcggtggctgtgttaggcgacatgtggtcggtggtcacaatcatatctgcgatttgctggtagagcggttggcgtgtggcgtagagatcgctcagcacctgtttgcggtcgatttgttgcagtaatggccggtagcggtcatgtgccagtcgctccaattgggtattcacgttgatctttagaaacacgacgaagccgcgttcttgcatgcagcggcggttctctggatccaggatcgtaccgccaccggtggcgatgagttggttttcgtgattcagcaagtcgtgcagtacttcgcgctccaggcgccgaaattctggctcgccggaatatttgaagatagcggagatgttcgtgccggcgcgttcaacgatggcgtgatctgtatctgcgaagtgtaggctgaagtgtttggcaatgcgtcgtccgatggagctttttccggcacccatcgggccgatcatcacaagattgggagcgggattcataacgtgttgatgttatcactgcgtatttgtcgcgcgttcgatcacgtgcgcggtgatattggaggtgagattgtttgaggtgtattgggaggtgatttggtaagtggtatggagttgcaggttgtttttctgcatcgcggggatgggtgttgcgagtggttgcagtgtgtaggtttgaatggctgtcttgatttgcctataggcggtgcgatagggatgcgaccacaatagggtgatctttccatgtctgtttcaatctatgctcaatttgtacgctgaagccttgtccacgttctcgttgttgtttgaagaagccaaaagcagcagcgagattgagcctgatgcaatgatgttggccacggcttcgttagagggtcatccgagtgtgcgtacggtcttgttgaagaagttcgacgcgcgcggttttgttttctatagccatattgatagccccaaggggcgcgatttgcaggccaatccgcaggctgctctgttgtttttgtggcgttctttgcgtgaggctggggtgcaggtgcgcattgagggaagggtgcagcaggtcctggccgaggaggcggatgcttatttcgcttcgcgtccgcgtcagagtcaaattggtgcatgggcttcgatgcagtcatgtcccttggggtcgcctgaggagtttcaggcccgtttggcggaggtgaaagcgacgtttgagggacgtgatgtgccacgcccggaagggtgggtggggttccgggtggcgcctcgagtgttagagttttggtatggggcccgctttcggttacatgagcgctggcgttacgaggtggatgcggctggctattggcgtaagtttttgttgtatccctgatggggttgtcagaatggatggcaggatgctgctgtagcagtgtgtgcgggtgctgtgtgtgtgtgcggtgtcatggcactttgggcagcggacgctgtcagggtgttagatcaggttaagtacgccatcacgcggaggctgtgcgatgaaaacgcaggattttcttgcgctcgatgggatgtcatgctgcaggcactctacggtgagcactggcaatactggtttttgatgttaggcggggcggttcagtcgcgttgccaggtgtcgcgtagcgtgacgctgcgattaaagacggggtgtgcggcatcgtggtcatgccggtctgtgacgaagtagcccaagcgttcaaattggaatgcgtgttctggtgcggtttgtgccgccgctggttcgatgtagccatgcacgacgcgtttggaatctgggttgaggacgtcgcggtaggtttttccgtcggtgttgtcgtcaggtttttcaacggagaacagccggtcgtacaggcggatttctgctgctacagcgtgtggtgcgctgacccagtggatggtgcctttgactttgcggtgagcgccttccataccgggacgtgaggtcggatcaagccagccgtgtagtgcgatgatgtcgcctgctgcgtttttcaccacctcatctacacgtgcgatgccggcgccgcgtaggcgtacttctccgcctggaaccagccgtttccagcccttgggggggatttctgaaaaatcgtcgcgttcgatccatagttcgcgtgagaacggcattgttcgggtgccttgtgtgtcgtctttgggatggttggggaaaatcagctgttcttcatggtcttcgggtaggttggtcagcacgagtttcagtggtgcaatggttgccatccggcgtggtgcaatggtgtccaagttctcgcgtaagcagttttctagtactgaaaaatcaatgatcgagttctgtttgctgatgccgatccgctctacgaataggcgcatggccgctggggtgtagccgcggcggcgtaggccttgcagagtgtacatgcgagggtcgtcccacccttcgacgagtttttcgtccaccagtgcggtgagcttgcgtttgctcatcacggtgtagttgatgttcaggcgcgaaaactcgatttgccgaggttggctgggttcttgaggaaagcctttgtccagtaacggtttgagtaggtgtgagttgttcggtaggtcgacgtggttgacgcaccagtcgtacagggggcggtggtcttcgaactcgagggtgcataatgaatgggtaatgccttcgatcgcatcgctcagtgcgtgtgcgaagtcatacatggggtagatcggccaggtgttgccggtgttttgatgttcgacgtgtttaatgcggtagagcgctgggtcccgcaggttgatgttgccgctagccatgtcgattttggctcgcagggtacgtgttccgtctggaaacgtgccggcgcgcatctgtcggaatagttctaaattttcatcagggctgcgttcacgccatggtgagggacggcccgcttctgtcagggtgccgcggtattcgcgtacctgttcgctattgaggtcacagacgtaggcttttccatcggtaatgagtttttctgcggccaggtacagcacttcgaaataatccgatgtatgtcgtagtgcgttccaatggaagcctagccaagagacgtcgtcctggattgcagcggcgaacgcggggtcttctttgctcggattggtgtcgtccatgcggagggtgcagtgtccgccgaattccgcggcgacgccaaaatccaggcagattgctttggcgtggccaatgtgcaggtaaccgttgggttctggggggaaacgggtgcggatgtgagtgtgtgtgccgtgggctaagtcttctctgatgatctgccggataaagtctttcttctcaggctgggctcgggcgtcggtgctggtgatttcggacatgctgggtcgaacggtgtgcaggtggcgagtttagctaaacttcgtagattttgccccgggatgcgtcaaggtgtgcaggggttttatttttgtttgtgcggcatctttggtgtggatggtgtgtcgtatttggtgtctgggtgatgtttgccaagccatctgtgtgttgcagaacgtttgtgtggtgtgcggtgtgacatggttagaggggtgtgatgttcattctgttgtatgtctgtatgtctgtatgtctgtatgtctgtatgtctgagcggcggcggtccatagggctgtggtgttggagtagtcgctgggtggtgggggttgggtaagaggggtgctgttttgctggggttacagtgatgttgcggtgctgcaacggtgaacggtgttcagtggcatcaagcagctgtgtggttgttggggtagtacgttttttacggtaagcggtgagtttccattggtatgcagctgtgggtgtgtctgtgtttatttggcgatctgggtgtatctgtacggaagtgtttgggatgtgttgatggtgcggtgtgttgaggttgggggagtcgttgcagttcagggttatttgtctgtcgggtcaagtgggtatgggatgggttttattgggcatcgggtggctttgattggttgggatggtgtggcgtggttgtctgatgttgaaggtctggaagtgaggtgagttttgatgtttatgtcatacgcgtttttgggaagtcacgaggatcacgggaggcgggtatgagtgtgtcggctggactggaggtggctgctggctcggttgcgtcggcgctggccgcgcaggagggcggggccatgcgggtggagttgtgtcatgggttgggggggggcgggttgactccgtcgtatgggatgttggctgtggtgcgtgagcgtttgcatatcccgctttatgtgttgatccggcctcggggcggcgattttgtgttttccgaggaggaaatggaggtgatgtgctgtgatgtggagtgttgcgtgcgtcttggttgtgatggggtggtgcttggtgcattggatccggccggtgaggttgatatggggatgatgcgggtgttgattgccgtggctgggtcgcttggtgtgacttttcatcgtgcgattgatgtcagtgcggatccaggacgtacgttggaggatgtgattgcgctgggctgtgagcgggtgttgacttcaggggggcgttcgagcgcgctggagggtgctgagactattgcggcgttggtggctcaggcagcagggcgggttgtggtgatgccaggtgcgggtgtgtctgcagggaatgtcctggagttgcgggttcgcacgggagcgcatgagttccatgcgtcggcgcgcagtgtggtggctgcacgacgtttggggcctcatccagatatccatgatttgggtggggattacgattgcacagatgtggacaaggtgcggcagttggtgaggctgttgtctcagggggcatcgtgatctgttgggcagatggttctgttggtggattggattgttgggtggcgttagatcattgcgtggtatgggtggggcagggggaagggtgttgaggtgacggggaggctatggtgaatgtgggggtaaccgtgcagtgggttcgtggtgatgattgtttggatggttcatttggcatgttggtgctttgtttcatgatttattacatctttgttgcttaatgaattagattcattttcaggtggataaggtccagatgtgtcaatcggtattcaggtttttgtgctgtgtgttggtggtgatgccgattttcatcctgtcggcctgtgctttgaagtcttcgcgaccgaatatgctgcaacctgttgtgttgccgcaggtgtctgggaatgtggcgaggtatcggttcgagatgactcagaatggccagcggatgacagccgatcagttcgatgcttggatgcaggctaacgggatccatatcgttaagaaggtatcgggtatgccgacatcgcaacggcatatcacccgcgttggaagttcagcaccatagggggagtgcggcttctgtgtcgattggtcatgcttaaaagtcataaatagccagcttcatgtcatttcaccgcctgcatgtggttgcgcagcatggcatccttgttggaccggctgtcgccgtgattgcgcaggagatcgacatgaaccgatgtattccaattcgatatgttgcagctttgttgttggcgctgctgttgagtgtgtcgttggcgggtgcgcgcgaacagacgttgctcaatgtgtcttatgatccgacccgtgagttttatcgggactacaatgctgtttttgagaggtactggaagcagacgaccggtaagacggtgaagattgaaacttcgcatggtggttcgggcaagcaggcgcgctcggtgattgatggggttgaggcggatgtggtgacgttggcgcttgcctatgatgttgatgcgattgtggaaaggtcgaggttgatcgatcccggttggcagaagcgtttgccggataacagtgcgccttatacctcgacggtcgtttttctggtgcgtaagggcaatccgaacaatattagggattggcctgatctgttgcgttctggggtgcaggtgattaccccgaatccaaaaaccagtgggggagcgcgctggaattatttggctgcttggtcttatgccgactatatcttcaagggggatcgcgagaagattctgcgttatatgcgggcgttgttccgcaatgttccgatcttggacacaggggcgaggggtgcgacgacgacgtttgctcagcgtggcattggtgatgtgttgttgacgtgggagaacgaggcgctcttggctcgggaggagttgggtccagacaaattcgagattgtgatgcccaaaatgtcgatcctggctgagccatcagtggcattggtggataagaatgcggataagcacggtaaccgtgcggtggctgaggcgtatctgcaatatttgtattcgccgagtgggcagaggttggccgcgaagcatttttaccgtccacgccatcctgagttggtcgatgctgtggatttggcgaggtttcctcggattaagttggtgacgatcgggcgagcgttcggttcttgggctaaggtgcagcaggagcattttgccgatggtggtgtgttcgaccagatccaggcgggaaagtagtccatggctgaaagtactgcggtaccgacgcctttatcacgtcggcgcgtgattcctggtctcggattgagtcttggaattactttcgtttggttggggttaatcgtgctgattccgctggttggcgtatttgtcaaggccagtgggttgggatggagtgggctatggaatgtatggatggaaccacgggtgctgtctgcgttgtcggtcagttttggctctgcgttagttgcggcggcgtttaacgcggtgatggggacgtgggtcgcttgggtgtttgggcgttacgattttcctggtaagcgtgttttcgatgcgatcattgatttaccgttcgcattgccgacagcagtggctggtattgcgctggcggcattgtatggacccaatggatggatagggcgttggctggagctggctgggttcaaggttgcttacactcctttggggatcgtagtagcgctggtgttcgttggtctgccttttgtggtgcggattgtccagccggtgttggcagaggccgagaaggagttggaggaggctgctgcttcactcggtgcgaatcgttggcagacgatgttccgtgttgtattgccgacgctatggcctgcaatgttgacgggatttgcgttggctttcgcccgcggtgtgggtgagtatgggtcggtgatttttattgctggcaatctacccaatgcgaccgagatcgcgcccttgctcatcacgattcgtttggaggagtttgactattctggagctactgcaattgcggcagtaatgttgttgttgtcattcacggtgttgttaatggtcaacgcgatgcaggcacgcttattgcgtgttaaacatccggggggaagatgagcaaggatatgatgtctgggccttctcccggtgttcaggggcagaggggtgtacagcgttggcatcggttgttgaccgcatctgcgacgaccgagtcgttgtgggtacagtggttgcttattctgggtgcgcttggctttttattggcgtttttactgctgccactgatgctagtgttttccgaagcattgcgtggtggggtgcaggtttttctacgggcggtctctgatcctgatgcgttggctgcaattcgtttaacgatgttagtaacaatgattgtgttgccggtgaacatggttttcggtgttgccgtggcgtgggcggtcagtaagcatcagtttcctggcaagcggctgttggttagtttgatcgatttgccgttttcggtttcaccggtggttgctggtttggtgttcgtgctcatttttggtcggcaggggtgggcttggccgttgatcgaggatggagttcgcttctcattgcctttgtttggcgaggttatggtgaagttgccacgggtcgtgttcgcgttgccggggatcgtcttggcgacaatatttgtgactttcccgtttattgcgcgcgagctgatgccattgatggagcagcaaggcaatgaggaggagttggctgcgttgagtctgggtgccagtggttggcagactttttggcgggtgacgttaccgaacattcgttgggggctgttgtatggggcgttgttgtgcggtgcgcgtgcgatgggtgagtttggtgcagtctctgtggtatctggtcacattcgtggacgaaccaacacaatgccgttgcacgtggagattctgtatagcgaatacgcttacagtgctgcgtttgcctgtgcttcgttgttggcgttgagtgcgttgttgacgttggcgttaaaggcttttctggaaaagcgtcacggtgagttgttggctgtcgggcgccagcattgaggatgaattgagtatggggatcagaatccaggagctgtgtaaacaatttgaggatttcactgcattggcgggtatcgaccttgatattcgtcagggtgaattgttggcgttgctcgggccgtctggttcgggtaagacgacgttgctgcgcattattgctgggttggagcatgccgatgcagggcgggtgctgttcggcgatgaggatgcgacaatgatgagtgtgcaggcgcgccgggtcggtttcgtgtttcagcactatgcgttgttcaagcatatgagtgtgtatgagaacgttgcttttggtttgcgtgtgcgtcgtggtaaggcgcgttggccggagtcgcaaatcagtgcacgcgtgtttgaattgctttcattggtgcagttggatggtttggagcagcgttatccaatgcagttgtctggtggtcagcgtcagcgcgtggcactggcacgggcgttggcaattgagccgcgggtgttattgctggatgagccattcggtgcgctggatgcgcaggtgcggcgtgatttgcgccgctggttgcgtgagatccatgatcggactgggttgacgacggtgttcgtcactcacgatcaggaggaggcgttggagttagccgatcgggttgcgattctcaatcagggtaggatcgagcaggttgcgagtccggctgaggtgtataaccgaccttcttcgccgttcgtgtattcgtttgttggagcggtgaatcgattgcctggctgtgttggtgctgatgggttggaggtggctgggatcgtactgtcttgtccgccgcagctatcggggtggggggcggtggatctttacgtgcgaccggaggatctggtgctagatgctcaggaggggtggttagccattgtgttgtggagtcagcgtagtggtccaaggatgcgtgtgcgtgcgcgtttggagcacagtgcacatgaggtggagattgaattgtctagtgcgactgatgaatatgttgaggggcagaagttgcgtttgatcccccggcattatggggtgttttttagtgagtctgggggttgagtagtctgtcagatacgagatatctggttgctgtgaggtgagaggattgctcatcatcaagtgatgatggatgagcacgctccagaagaggggctatgaggttctacgggtgagtctgttctggatttgtgtggggtgatcttccgctcagtttgtgtaatcaagtcgtttcaaacgctacgtttgttatttaattcagtgggtttgctttgataagtgcatcaccgatcaggatgcttgagtgttttcgctattgagtgtgattggtgttttatttcataggggttgtgttcgccgctatccggtgggcgcaagctgtagcgcttgtaggtccactgatactgagttgggtcgcgtctggcgatacgttcgatccctgcattaagtgcggtcgccgcgatcagtggatctggatccgccaccgctgggtcggcgtgttccatatgcaaggcgaactctagatgaggactaattcgctcgcaccaggcgtatagcacggttgcgctggtccgttccgctaaacgctgtacaagagtcatggttaatgcttcgatgccgaagaatggtgcaaatacaccttcgccgatcttcggttgttgatctggaaggattccgattgtgccgccatttttgagcactttgaaaagatgccgtactgccatcccttctgcacgaacttgatggacattgttgccaccacgtactcgttgtagaaagccatctaacacggccgaattggctggacggtacatgagcgtgagcggcgcaagatcggacaggtactgtttcagtaattcccagttgccaaaatgggggacaacgataatcattcctcggttgcgggctagggctgcactgtacaaatctacgccgtggtattcacgtagtcgcgccaagttttctgtctctgggtgggtccagatatgtagcatttcgaacgcttggcgcactgtggaataaatgatttggtgatgtaggcgtgtgtgctcctgtggagatagttctggataggtcagttccagattgcgctgtgtcacacgactttcccgagcgttcaaacaaagccagcagtaagcgatcagatctgacagtcgtttgaggaatggccaggggatgtgccctactaatgatgcgacccgatataaccagcgaattttggagttggcgttcatttatgcaattttagaaggacgctatcttcacgagttgaagattaggttgcgatcagtcatatcgttctgtggcgtgctggtgtgtgattcatgtcttctgttaataggagcaggcaaccaagtttcaacaccatcatcagggcaaataaacaatgccgtaagagaattcagataaaccgaagttaatagtgatggtttgggttggaagtggtctttaagtgtctatttttcaattgagaatccagggtttgacgctcattaggtgtttcagggccgctaaaaagcccctgctgttaagtacgagaaacggtattgaactgttataatgctttttcttgctatagtctttgagaatgcgaagccccatcatgtccaatgaacgaactgctcagcaatccgatatcaagcaactgatcagcaaggggttggagcagggttacctgacttacgccgaagtcaatgatcacctaccagaggatctggtggatcccgatcaaattgaagacattattgggatgattaacggaatgggcattgaggtccatgaagtggctcccgatgctgagactttgttgcttaacgaaggaaacactgggaacagggaagtcgacgataccgctgcagaagaggccgcagctgcgcttagcgcccttgataccgaagcaggacgtactaccgatccggtacgtatgtacatgcgtgagatgggtacggtcgaactattaacccgtgaaggtgaaatagcaattgcaaagcgtattgaagaaggcttgagcgaggtacaagctgctttaggcgttttcccgttatctacggaattactgcttagtgaatatgagttgcataaagaaggtaagcggcgtctgactgaggttgtcgttggctttaatgatttgatagaggaggataactccgtaacctcctcagtggacgttactgacgagtcgattgttgaggttgacgaagaagacgatgacagtgtcggtaatgatgaggatgcgcctacgattggtcctgatcctgccgaagttgcttcgcgtatcgaatcgctgtccactgagtatgccaagttcaagaaactttacgccaagcatggccctgagcacaaagcagtcattaaggtgcgtgaagatgtggctgcgatctttgtgacgtttaaactgtcgttgccattgaccgatttacttgttcagcagctacaaaatatggtgaattctgtcaaggatcatgagcgcaaagtgcttcacttggcaacgaatgtagccaaaatgccgcgtaaagacttcatccgttcctgggaaaacaaccagacaaatttagaatgggtggaggatgcgattaagcgcaagcagaaatggtcctctgcgttgcgtgatatcaaagatcagatcaccgctgagcagcaagcttccattgatttggagaaagctaattctttgacgttagccgacatcaaagagattaaccgtatgatggtttatggtgaagcaaaagcatccaaggcgaagaaagagatggttgaagctaatcttcgcttagtgatctcgattgctaagaagtataccaaccgagggttgcagttcctggatttgatacaggaaggcaacatcggtttgatgaaagcagtgtgtaagtttgaacaccgtcgcggctttaagttctccacctacgcgacttggtggatccgtcaggcaattactcgttctattgccgatcaggcgcgcaccattcgtatcccggtgcatatgattgagacgatcaacaaacttaaccgtatctctcgtcaaatgttgcagcagtttggtcgtgaggcgactccagaggaattggctaaggaaatggacatgcctgaggacaagatccgtaaggtaatgaagattgctaaagagccaatctcaatggagactccgatcggagatgatgaagattctcatctgggtgacttcattgaggatcctaatgttgagtctcctgtggataccacaaccaatgtcaacttgtcggaaacagtgcgtgaagtgttggctggtttgacaccaagagaggcgaaggttctgcgtatgcgtttcggtattgatatgaataccgaccacactctggaggaggtgggtaaacaatttgatgtcactcgtgaacgtattcgccagattgaagctaaagcattacggaaacttcgtcatccaagtcgttctgaacaactgcgctcattccttgatattgactgaatcaaatctggtcatgatctttcccatacgtgcttaatcacgtgtagggcaagcaaatgtgatctggtgcgatgttgatgcggcattgttgatgcggcattgcctttgttcgttgtttgttgcttttcaatctttagcaatattcccctttaaagaggggggctgatctttggtagtgaaatgggtttacatgggagcaagggagcaatcgaatcacttcgaaaattaacgcaatgcgttttatttcagtgttacagtggcgttgttaaagatagttgcgtttcctgcttgattcccggggaattgctgattacctaccgtgatatcgcttaagcaagcgaagtgaaatgtggttttcggtttctttcatggcatcagattgtgatgcactacataaattaccaagatagaaagaattattttcaacgcgtagtcggttcagaactatcctgtctagcttgttatgtttgtattgcttactatcaaaccagctggcaatggtggtttatggggtagtttagcctcatctacagggttccatttttgcgtggctgtgtatcttccgccatgttggttactggatatcgagtgtgtcgattttctgccagcctcttggcagtaggtgaccgcggctaccacgtgtatcaaggtaagcctccaaatctttaaatgaaagacgcattgtgcgttcgccgctatagagcagtagggtgtgactcgaagcgactgcgatgacagcgactaggcgttcagtggccagtttggtttttggaatatcaatcagtttgttgcccttgcctttatctagttccgggagttcgcttgctgcgatggctagcaggttgccggcgctggtcaccgcgacaatgcggtcatgtcgcacgtcggtcagcggagctagtcccatgacctgggcgccaggtgtgagatgaatcatggttttgccggctttgtttcgtccggtgagattttcgaaccgggtgatgaaaccgtagccgtgagaggaggccaacacgaataatttgtcgttgtcggcactggccatcgcttggaatgaagcaccaggggcgggcgaaaagcgtcccgttagtggttcaccgttgccgcgtgccgagggtagagtatgcaccagtgttgaataggcacgtccttcggagtccaggaaggagacttgatgggtgctgcgggtgcgcacggctgccaaaaggcgatcaccttcacggtaggacatcccgcttggatcgacttcgtggcctttggctgctcgaatccagcctttctccgagagcaccacggtcatcggttcgctagcgaccagttcgctttcatcaatggcctgtgccgcttggcgtgcgacaagcggcgcacggcgcgcatcgccgaacgtcttggcatcggccaataattcgtccttgattagttttttaagttggatgtcgctatccaggatgacattgatctcgtcacgttctttagtcagtgcgtcttgttcattgcgaatcgccatttcttcaaggcgcgcgagttggcgtagcttggtgtcgaggatgtattctgtttgcgcatctgacagaccgaagcgtgcgatcaggactggtttgggttcgtcctcgttgcgaatgatgtggatcaccttatcaaggttgagaaaggcgatcagtaagccttccagcaggtgtaggcggctctcaactttttgtagtcgatacttgagacggtgggtgacagtgtcgctgcgaaaactgagccattcgctgagcagttgtttcagaggtttgacttgcgggcggccgtccaggccgatcacgttgaggttcacccgatggcttttttctagatcggtggttgcgaataggtggcccatgagttgttccacatcaatccgttgggaacgtgggaacagcacgatacgcaccgggtttttgtggtcggattcatcgcgtaccccttcgccgtccaaccagggtagctttttggaacggatttgctgggcgatctgttcgattactttggacggtgacacttggtaaggtaacgaggtgatcaccacgttgccgtcttctttatggtaggtggcacgggtacgcacgctgccattgcctgtctcgtagagattttgcaggtcactgggtggtgtgatgatctcggcagccgttgggtagtcagggccgcgaatgtattggcacagcgcggcaatagtggcgtttgggttgtcaagcaggtgaatcagcgcgctggcgatttcgttgagattgtgcggcggtacgtcggttgccatgccgaccgcgatgccagtggtgccgttaagtaacaggtgtgggaggcggctcggcagccatgcaggttcttccaaggtaccgtcgaagttggtgatccaattgactgtaccttcgcttagttcactgagtaggatctcagagatgggggtgagtttggactcggtgtagcgcattgctgcgaatgattttgggtcgtcggaagagccaaagttgccttgcccttcgatcagcgggtaacggtatgagaacggttgtgccatcagtacgagtgcttcgtaacaggccaagtcgccgtgtgggtggtacttaccgatcacgtcgccaaccgcacgtacagacttcttgggttttgcctttggattgagccgcaattcgtgcatggcgtagatgatgcgtcgctgtaccggcttgagaccgtctccgataaaggggagcgcgcgatcaagtacgacatacatcgaataatcaagataggcacgttcggcgtattcgcgcagtggcatctgttcgaagccatggaaggagggacgagtcagatcggtcattgtgtggaagtgtgttctctattcaaggaatcgggctgtgctgatgcgtcactcattcagattcaagtactgattatccgtatgtgccccaagaagccaagtcacgtcaggtgctgtgggtcaggcggcagtttggtgagatgttgcaaagggggacgaagtgccctgagtaatacgtgtaaatgtgtgtaatccagtgtttctggaagtgattggtacggtatttgctatttattcaaatgctttgatcgatcatggttgcaattcatccagagtgtcgttgctttcgttcatagaatgtttaatatttaaatttggaataatttcttattgtaactaatgtgtatattatggatccatctacatctccaggtattagcctgctgttacgtcaagtctgtgacggccttgtgcgtcagttggatgaggagatgcgtcaagagtttcccgatcttgggtttactcattatctaggtctgaaggtcatcgcaatacatgcaccatgcacggccaacaaattggcccaggcattggatcaaacgcctagctctgtgacccgtctcctggataaattggaggcgatgggtgtggtgcgtcgtgaaccgcatgcccaggatcggcgtgcgttgcacatcgttatgacggagactggcaaggatttgtggcgacgtttgaaacagcatggtgagtgtgctaccacctatgccttacgtgaattgtccgaggatgaccaaggccaactgattcacttgctgacgcgtattcgcaattcgttagatttgccatgatttttatccgtttcccattacttgcagtgtgtccttaatacgttctgttaaagaaaaaattattgaagtacatataaatggtaagccaattccttgttttcatttctccatcctcttttgtgcctatacccattattttttctgagattattcgcatcagtgcactaatggcacacattttgactttgccacggaagcataaccgctcgtatatcgcctttatagttgggttaaattttagttctcataacgacagtagatacagttttactttgatttccagcggcccgatttttcacaatcgcggttttcctctgactggcagtgccggtgcatttttaacggtgatcattcccagaaaagctgtcgcctgttgagcagttttgaacaaaaatggctgtgcagataagccccatattcagacctaattgaaaatccacgaatgattggttgactcaagcgccttgttggggaacctagactctttatctggttggccttgttcctgcgatggtttctgttgtattgcgctttctagcatcttggtgatcgcgttcgtggtgttggtgatctggtcgttgaccgataaggacccagtaatcaatccaaagtggtttatcaccgtcactgctacgccgctacgcttgttgatgcttgcctatctggtgcaggggttggagtatttttcgtatgttgtttggtggctcttttgggatgcgggacgatggcacgagtgtagttcatgcaggttggagggccgtgatgtgtaggttggaatcgagctggtttaggggagagtggcaatgaagtgctgtaatgctgccgtcatttgattggcatgactgaggaatggggcgtggccaccgccggtgatggtgagtaattcggtctggccgctcggtgccagtgccgttgctgcgtggatgctcgcagcgggaaccagtcgatcgcgttgcccggcgatccataggcttggaggtgtgaggtcaatcacggcgcgacgtaagtcggtatgtgcgagtagctccaggcctgcttggagtgttgcggtgttgggtgtgtggcgtgcatttaaaatttgccgtaattggcgcagttcgctctgtgcgtatgttgatccaagtgtgtccagtgcaagaaagcggttgatggtctctgtgtagttttgtttcagatcttcggcgaattgggtgaatatgctcacttcaacggcatgtggccaatcttcacgccgtacgaagcatggtgtggcggccagcatgatgaggccacgtacttggggcagggtcgctgcggcgtgaagtgcgaataatccaccgagtgaccagcccaaccacactgcaggaggggtcgccgcggcgattgcgtgaaccacgtgcggcagggccagtggtgtgagagtggtgtggttgtagccgtgtccggggaggtcgaccaaatagagtgtatggtgtgccctgagttgttcgaccagcggtgcgaatacaccgctgtgcattgcccatccgtggatcaaaaccagtgccggaccatatccggtaacttcgatatacattgctagatgtgttgctgataggaggaatctgggtgatctattggtcgatcagtcatcggcgctaaggtgcttgaatggtcaggagggccagtgtcgtgcttttttgtcttgcgctgagatgcgggggagcgcacccctgcctatttatacttgtacaggtgcggcttcggtcgcgagggcatcgcgggagcgggcaagcgcttgcactaatgtgtcgatttgttcagtggtatgcagtgcggacagggtcacgcgtaaccgtgatttcccctcgggtacggtgggtggccggattgcgttgactaggaacccttcgcgttccaatgccgcggacatggccatcgttgtggtttcatctccgcattgcaagggttggataggtgtctctgaatccatgatctccaggccgtgacggcggctattctcgcggaaacgctccacaagttcctgtaggcgctggcggcgccattcgtcacgccgtgcaatacggatcgctgtcagtgcggcggcggcttgggcagggggcagtgcagtggtgtatatgtagggccgtgcggtttcggccaagtgttggatcagtgtggcagagccgagtaaggccgcgccgtagccacctagggctttgctgagggtcactaattgcaaggggacttcctctacactgagccaagcagctgcgacgcagccgctcccttgggggccggttactccgatgccgtgtgcgtcatcgacatacatcagtgcttgttgggtgcgtgcgactaggctgagggcgcgtaatggagcgatgtcaccatccatgctgaagatgccatcggttgctagcatcgctgcaccttcaggtgcgttcttgagttgatgcgccgctccatccacatcaaggtgcgggtagcggcggaggcgacagcctgccagacgggtagcgtctatcaggctggcatggttgagtcggtcttgaacgcagatgtcgttttccttggtgagcagggcttgttgcactgccaagttggcggtgaagccgttaccgaacagcaatgcgcgtgggtagcccagccattcggctagttcatattccagtgccttatgtattgcgtggtggccgcagatcagatgcgaagcagtggcgccgatgccatcgcgggcggctgcatcctgtagtgccgcgatgatttcgaagtgttgcgcgagtcctaggtagtcgttggaacagaattcgaccagccagcttccgttgatttcgagccgaacgccgttacgcctttcgatcgtgcgtcgcgtgcgggtgcggcattgtgctagacgcagtttgcgcagtgacagtatgcgttcattcaaatcgggtcggatcacgccggcatccctatgtgagcgttgagtccgttagcctagcgcgtcagctgccatgtcgcccagtcagtgggtgttccggagtttgtcaagctcggtggtctgtgggcgtgagtggtgcgttatttcgggggtgaatcactctgggagtggtgtgattagggcttgggagtgctcatggttagccttagcaggcggttgctgtgatccagagtacaacggggtacggtgtaactcgagtcaggtgagcgctgctgcgcattgttgtgatgcggggtggcgcgacattttgcctcagtttcttggtttgagggcggtcttacagtatttatgctgtttagagtctgttgcgcacgtattccaggatgatcggtatttatcgccgtttggcggtatgagtgccagcgatggcatggacggccgtggtcttcatagctgccagatatttatttgtcctgatcattgcatcagatttggaaggagcttggctgagggaggatatactagggcgtgtggttggagtacgtgtgagtgatgttgttgtcattgaagtgagttttttctgatggattcattcgtccggccattactgttccggcatttccaccgtatggcttggttagccgcattgtttactgccagcacaatcatgtttggtagttttgtgcgcttatctgatgctggtatgagttgccctgattggccgacgtgctatggccgtatcacttggccgcagacggtcgcggaggcaaatgctcatgctgccagtcagattcgcccattggagatgcataaagtctggcgtgagcaggtgcatcgtttcttggccggtatgttgggcgttgaggtattagtgctgtcgctgttggctgcgcgtcgccgtaggttcagtgtcgtgcaaatcttcagtgctgttgtgttggtggtggtgtcgattcagttgtacatggctggtcagcatgccggagcaatggcggcggcgttgttaggtgaggtgatcctactgttggctgcgctgcgctggaataaccaagatttgtctcgggctgctgtgctgactttggcagttgtgattttccaagcattgttggggatgtggacggtcacgttattgctgaagccgattgtcgtgatgggtcacttgcttggtggtttgctgatgtttgcgttgctggtgtggatggcttggcgggcgactcacttgccgatcactttggtagatgccactaaggtgcgttggtggctgcgttggggtgtggtgatattggtgttgcagattgccctgggggggtgggtcagtgctaattacgcggcgctggcgtgtgggggaggcgcttggttggtagacaatttcccgcgttgtgtgggtgagtggtggccgccgcacgacttcactgagggcttcactctgttccgtacgattggtgtggattatgagggtggtgtacttgatggcgcatcgcggattgccatccagatgatgcatcggttgtgggcgattgtggcttctgtctatctggtgtggctggcgtggcgtttatctcgtgagccggggatgctgacttgggcggtggtgttagcgctgttggtggtggtgcaagtgatgcttggtgtgctcaacgttaagttggcggttccgttggtggtgggagtgatgcacaacggcggcgcggtggcattgttcttcgtattagtttctttgctcgcacggctgcgtgctccggagtgagtatggcggctcggttgcgggattattgggatctgaccaagcctaaggtggtggcattgatcgtgttcacggctttggttgggatgtttctggctatccctggtatacccagtgttgtgcagatccagagtggggcacttggatttttaggcatttggttggcggcggcggcggcggcggcgatcaatcagcttctggatgccaaaatcgatgcgcagatggcacgtacttcatggcgtccgctggttgttggcaaggtacgccctgtgcaggtgttggtttttgcgggggtgttgatcacgctgtcgatgacgattttgactcttggggtcaatcttattacggcagtgctgacgtttacttcgttgattgggtatgcagtgatttacaccgtgtatcttaagcgtatgacgtcgcagaatattgtgattggtggtttggccggcgcgatgccgcctatgctgggctgggctgcggtcacggggttgtcgacagcggcggattggattaatgcatcattgttggtagccattatttttgtgtggacgccgccgcacttttgggcattggctatctttcgccgtgctgattacgccaaggcatccattccgatgttgccggtgacccatggggtgcaacatacatcccgtcagatcttgttgtatacggtgattctgagtgtggtgacgctgctgccggtggcgaccgggatgagcggggtattttatctgggggctgctttggtgttggacgctgtgtttctttggtatgcctggcgtctgcttgatccacctgatgaattatttgcgatgaaaacgtttggttattcgatcgtgtatttgatggcgttattcgcctttctgatgtttgatcattggctgaggttagcggatttttattggaattagtaattcaatgtcagtaggtgtccatggtgcctgattcatcattgcataaacttttgtgtgttgaattcaattcatgattgcaatattcgaggctgttaattcgtttcgatgggcgcattatgtagtttcttcaatttgttgatataaaggcagccaacattccagtatggcaattttatatattaattatattcttaaatgcacattgtcaatagtgggaataatttgatatttttaatggttttattttttattttaggtattggtaatttattttctctgatatgattttatttttgaaactatttcctttccatttatggaattatggatatggtaaaaatcctttttaattctcgagataatgaaaaagttgtttctgttcatatattatgtcatacgggttcaaggcagttctgagtactgagtggttggatgtttctttcagatgattttcacttaatgataaaccgaggatcatgtttttataaggaaataaaataaaaaagcatgaggttaatgaatgcaaagaaaaatgtagtttctgagttgggttggtttgatgaaatacatgaattcggtgtacagtacgacattaccagttaatgagaatattcactctttataatagatagagttttattcatttcaaaaaggaagaagccataatgatcacagtcacgccgttccagactggcacggtccgcatcaagacggctcaacaggcggggcaagacagtaagagtggtatcggtcgcaagcttgatatctttcgtgatccaaactggaccgaagtgctgcccattttttgtttcttgattgaacatccagaaggtcgcttccttgtggatacaggtgacacgtggcgcaactctatcccgggatatctgccacgctggaatccgtttctcactaagcaagtgatcgtcaaagtcgcgttgcacgaagagatcggcccgcagctattggcgaagaatatcgatccgtcgcgtgatgtcgaggccgttattctcacacatatgcaccatgatcacgctggtggcctcgatcacttcccacatactcgtatcatagtgacgaaggagaactatgatgcctctcgcggattctttggtagggttgcaggctgtctgcctcagcattggccaatctggttgaagccagagttgatcgaaccgactggacctgctgtcggtccgttcgcatcctcctatccaattacccgtgatggccgcattgtgcttgtaccaaccccaggccacgtcaaggggcatgtttccgtattggttcgtaacgatgatctgtcgatctttattgctggggatgcgacgtacgccgaggatattctacgttccgggaaggtagacggtgtgaccttcgatcctgtgctgtcgaaagatacccttcgtaggatcaccgagtacgcaacatcgacaccaacggtcatcatgccatcccatgatcctgatggcccagcacgtttggtggttcgtcaaacattcatttgaccaagcgatgccggctcacatatggtgtattagtttgttgtatttcctgcagcagtagctttgtccatgatcgctagtggggctgtttgctcgcttcctaatgaagtattcgaatgcatcgtgcgatagaaggttcgtggctgaggcttggaagaacgcgattacgtctagtgagcagctcgcagacttataccctgcgtatctaagcttcctggctcgctgatgagcggttatttgcgatggcaagccgtgtaggtggtacgccgaggcagatatcggtggttgtgtccggtttcttcggtatgtggccaatcacctgaaatatgccgttttgattttatacttcgtagcaaacgtcagaaatttgttctcgttcccccatcatagacaccagttgagctgatcgcacggatgcgtgcttgagccagcgcttcgccgatttgtgtaccgtgtaaatcttgtctattaaggtcacgtgcgttgactgccaacgctgcggcgtgcagtcggcataaatgttgtccttgtgggtagttagcatcttcatgtccatagcgccctcgataatcggcttcgcaaacgatcgcaagttgtgcgatccgttcggggcggcggaaggcatcacagcgttgcagcagttcgtatacggtatggtcatgcaactttgacagacggtgtacgttgaggtgttcgcggcaggcgatcaatgcgagttgctggtaatcccgggggactttcaggcgttcactgagctgttgtgtcggtgccatcccgcgttgttcgtgcatcggatgatgaggccatgttgcgcgtggtgtcagggcttttccgaggtcgtgacatagcgcggcgaagccgatcagcatatcgccaggtgccagctttgcagccatatcgctgaccaattcttggtggaggccggtgtcgatttccgggtgatagtctgcgtgttgtggtaccccatacaatgcgtttaattcgggtaacacgacctccagtgcattcactgtgcgtagtgtatggaggaaggccgctggttgtgtgtaggccagagatcggctcaattccttccatattctttcgggtatcaagctgttgagttcgccactagcagccatctcacgcatcattgttagtgtttcaggagcgatgctgaagcccaaaggtgctaaccgtgccataaagcgtgctgcgcgcagtacgcgcaacgggtcttcggcaaacgccgggctaatgtggcgcaatatgcgttgctcaagatcgttcacgccgccataggggtcgatcaatgtgtcattggtttggtcatgtgcgatcgcattaatggtgaagtcacggcgttgcagatcttgttcaagcgtgactgttgggtcagcgttgacgataaagccgcggtagccgtggccgtttttgcgctcggtacgtgctagtgcgaattcttcgccggtcttggggtgtaggaatacaggaaagtcacggcctaccgccttaaaacctagactctccatgtgtgctgggtcggcgccaacgacgacccaatcgcagtcgccagcaggctgaccgagtaatgcgtcgcggacggcaccaccgacaagatagctcttcatgcatcatctcagcgatgaggtgcgaaggggggacactgcccacaagtggccgccaagtggcctgggctgggttgttatgggatgcgtcgtgctcactggcagatgacttgtttacggtcgtgagtggatttgccaagtaaacgatcagtgaggagcactgtatcgccgttgatgcgccagtcatagatcacgctaaaagcaaggacgcgcgcgacatattcgcgtgtttctttgtagttgatggtttcgatccagagatccggatcatagtttgggcgctgtgataaccagcgttgcactgagcctgggcctccgttgtaagcggcaatggtcagatacggatggttgtattggtcaaggagttggcgtaaataagcgctgccaatgatgatgttggtgtctgcatcgtataggctgttggcgttgctatagtctgtgaggccaaggcgtttggagacgcttgctgctgtgctggggagcacttgcatcaaaccacgtgcattggctggggagcgggcgtgtgggttgaagatgctttctgcgcggatttcggcagtgatccaggctgggtccaatccgtttttggttgcttcacggtggatcgtagtctcatggcgtattgggaagcgcaggtcgtacatgcgtagctcggcaggctgcttaccaagtgcgaatacggcacggtcgaaccattctgcgtcactggccacttctactgcgagtcggcgttcgttgtcattgaagcgtgtgagtgcgtcgctccattcaagtgtcgcccaagctgtccggtcaatctggaacagtcctatcgcacgtaccagtgctggagtgcgtgcaacagcggctttggcctgggcgtggtcaggggtatcgttgggataccacgggcagagtgaatagggttgttgcagatggtctgctgcaaggaagccatgaaatgtcgcactgcgtgcagcagcacggtacagcgtttggctctgtacgctgtcgccggtcttttcggccaagcgtgcttcgaagtattgccagcgggggtcgccacgctgtgtcggtggcattttgcggatcgcatttaatgcagcttgccagtcgccacgtgccattgcttcgcgggtacgccattcgtgcaaacgttcgtcgtaggccgattctggtactgctgccagtcgccttgctgattctggttggtaggaggcgacggtccataatgcgatttggtacagcacttgaccacgctgcgcctcattgaggttaagggcatcggtgtacttgggtaaggaacgttcagcggcgctcggatcagctttggccatgcgcgctaatccgtcaataacgatgcgttggctacgttccgtcttgggccaattcggtacggcctgggcctgatttggcgcttcgacaaatgcggcgtagttgttagccagggtttgatcactggttggcaggccgcgtgctgcggcgcgcatgacttcgggttgttgcgaatcggcagcagcttcgatgcgtgcccagcgcagtgcattatccaggcctccttgagcagagagtgtggcgaatacggaatcacagatgttaggcactggtttgtcggcatcgcgccatagttcttgtgcttctttggtccactgggtgtctgctttgcctaaacgatagcgtgcttccagttgggcacaacgtagactgacggtacgggtcggcttccaatgtgttagcagtgtgttccagtctttacgccgcacgacgactggcagccatgctgagcggaatgcgtgagcgacggcttggtcggcgtaacgtgataggaagctttgcgcctgcgtattgctgattgtgtcgatattgcggcgtagattggcgtattcgatccagccgtataacggatgtttgttcagagttgctgcttgagatgggtcgaggcgaccattttcggctgcggcgatggcatcgcgaacagccatcagttgtgggtcgtcaccttgtgcacgggcacaggcagcaatgcccagcgttagtgcagtcacgaaacgtaatagcagagtcattccagggaatatatcaaagtcgccgcctgaatatttgttcactatgcggggcttgcttggggggcaggtgatttgtgtcacgtgatagttctgtttgcaatgcgttattgtttttgcatcaccgcaggatatgcggctcactttaatagattggatcaattcgtgatggatctcatttttcacggtttttttggggcgatgaatgctctacaacatcagttgttttgactttaagacaatagtcatagtcattgtgtactgcagcaagcttgctgagggattgctttacgtgggtgttgtatgtgatcggcgtgaaaccggctctcatggtgatgatagttgttcacaacaaagctgtgcgcggttcgatgtgatgcagggtacaggttgtacggtgccgcagattccggaatctgtattgtaatcaatgtggctgttgtaagcggatcatctaaatcattccaaagatgtaagaataaaagtgcgtgcagggaacggaagatggcttgagtttaactgtgctcagtggatgggcgtctattctgagttggggttgctagcatgtgtccttactgtgtgtccgttgtatttatggggcaggcgatgctgttctttggcggcatgttcgcgtcattcgatagctttccgttgaggataattatcctcgtgccgctttgtttaatgttgagcacgcgttggaatgctgttgaatcatgatttttacatgattatttttcttgtgtaggtgcctgtgttgagtgatttaaagaaaggcggtgtgctagtgcttgaccgagtgtgaccgggctttctgctgtgaggtgaggggcgagggtgaagacatttggtggcaacagcacgatgactgttgaaccatagttgaagcgtgccatttctgcgaagcgctctatggcgatattgcgtccttggtagtccttgtgtgtgatgcgatcgccataagcggggatttccacaccaccccaaaccgtttccacaccagagacaagcagcgctccgaccatcactaagaccatcggcccgaatgcagtgtcaaaatggcatgccagtcgttcgttacgtgcgaacagtcgtggaatttggcgtactgcatctgggccgacgctgaataagcggcctggtacatgcactgttttgagcagctgacccgtacaaggcatatgcacgcggtggtagtcacgtggcgataggtagacagtggcaaacagcccgttggtgaaggcagcagcagcagcggtatcgcccaataactcggttgcagtgaaggattggcccttggcttgaaagatgcgcccttcgcggattggcccgagttggctgatgcgtccgtcggctggcatgagcaatgtgtccggattcggatcagggaggcgtatgccggttttaagtgatcgggtgaaaaaggcattaaagcttgggtaggcatgggcatccggctccgccgcttcgctcaggttgacatcgaattttgcgatgactgtgtcgatcaaccactgtttgatcagtggatgctggcaataggcgacgtggcgtgctagcgaggacagcatgcgatgtggcagaagataggtcagggtggtgacgaaattcacagagtggtttccttggtgagcttttgcaggttcgtggcgatttcctcagcgttgaacggtgggtggatcatgccgacatggcggccttgcggatccaatacaacgattgctgtggggtggtccatcgtatcgtcgagagggttttcggcgtcacttttgccaggtactttccggaatggaagccctaatgcggtggcaaagcgctgtaacgctggggtatctgctaacgtgttttgacagatatccgtgcaggacgtgaagtcaaaaaacacgagggtccaatgtcccttcagagtatttgaaataagctgagtaccgtcggatgaacgcaaatcgtcgagatgcaggaccgcatcaggtgtagggaagaagcgcaccgcctgagtgtgcagctaagagggtgtgtgtgttgagcagccatatttttccgatcagtagagtgaagccagcggccagtgcggtcagtaagacaagcacggtgctacggttgaacatggtggtttccactgcaacggatgctcaatcatagcgcggctccctctataatcgtcggccgacctgattttggctgttgctatgactcctgctgcggccgatgaacttcacacgatcgttgacctaatccgctacggtgccagccgtttcagtgaggctggattgacctttggtcacagttacgacaatgcgttggacgaggcgacgcaactggtgttgcatgccttgcatctgccgccggatcttggcccggcctatggtcaggcgcgtttattgcatactgagaaggaatgtgttctggcgctatttgagcgacgcgtgaccgagcgtgtgccggttgcgtatttgacgggtgatgcttggtttgccgggctgaactttaagagtgatgcacgcgcactggtgccacgctcgccgattgccgagttaattcaggctggttttgagccgtggttggcagggcgtgacgtgcgtcatgccctggacttatgcaccggctccgggtgcattgcgattgcgatgggtcactacaaccctcattggagtgtggatggggctgacatcagtgaggatgcgctgtcgttagcattggaaaataaggtgcgactgttggcgcataacgtcgagttgatcaagtctgatgtgtttgctgggctggttggacgccgttaccagttgattgtcagcaatccgccttatgtgactgacgccgaaaccgatgcactgccgcaggagtatggttacgagccagagctgggtttgcgtgctggcccggatggactgaatttggtgctgaagattttgcgtgatgctccggcacacttggatgaggagggcctgttgatctgtgaggttggggagtctgagcaacagttggtacggctgttgccgcaggttgattttgcttgggttgaattcaaagtcgggcaaatgggggtctttgcggttgaatgccgtgagttgattgctcatcatgaccctattgctgcgcttgccgctgaacgttaaggtgcttgttcatgggggcgaacacgtttggaaagttactggcggtcacgaccttcggtgaatcacatggccctgccattggctgtgtgattgatggctgtcctcccggattggaactcgctgctgaggagtttgcccacgacttgcagcgtcgcgctaccggtaggagccgtcatacctcggcgcggcgtgaggccgatgaagtcgagattctctccggcgtctacgaaggccgtaccacgggcactcctattgcactgttgatccgcaataccgaccagcgtagtaaggattatgcgacgattgcccggcagttccgtccgggccatgccgattacacctattggcagaaatatggtatccgtgatcctcgtggtggtgggcgttcttcggcccgtgagacaacaatgcgtgtggctgctggggtggttgctaaaaagtggctgaagcagcgttatggtgtgattgtgcgcggttttttatcccagcttggtgagatccgcccggaaggctttgcttgggatgcggtcgaagataatccttttttctggccgcaggcggctcaggtgccagagctggaagcctacatggatgcattgcgcaaatctggaaattcggtcggtgcacgcgtggatgtggttgccgaaggcgtgccgccagggtggggtgagccgatttacggcaagcttgatggtgaacttgctgctgcgttgatgagtatcaacgcagtaaaaggtgtggagatcggcgctggtttcggcagcactgtacaaaaaggaaccgagcaccgtgatttgatgacaccgttaggttttctcagtaaccatgctggcggcatcatcggtgggatcaccactggtcagccgattattgtttcgattgctctgaaaccaacatctagcctacgtttgcctggcgagacggtggatgtggatggccaccctgtccaagtgatcaccaagggacgtcatgatccttgtgtggggattcgtgcccctccgattgctgaagccatggtcgcgttagtactgatggaccaggcgctgcgccaccgtgcccagtgtggcgatgtcggtgagatgtctccgtgcatccttgagaatgtgggtttcaggaatgccgatgattgattgtcggtgacagggatggggcatgccgtggctgtccgacgttgtctttatgtggtttgatgccctgttgatatatccgccgacatgagtttttggggcctccaaaactcattggcagtgaaatatgtgttgttggatggggttcatgctcatgctccgctgcaacggatacattgctgtttatgcaatgtagtgatgttccacagcggtgtgtttggtattgctgacaagggattcgattgacacagattcacctggctggatgtcttggtgcgtgggttggatacaacgcgtttgcttcattgctttgatgatatccaatgatgattggggcttgtgtgttgctggatgtgttgcaaaggcatcttttaaaaggaacaatgtttatgtcttcatccaaatcagatcgttgttttaacattgccatcgttggcgctactggcgcagtgggcgaggccatgctttcgatcttggaagagcgtcatttcccagttgcgaagctgattcctcttgcttcggcgcgctcggcgggttctcagatcacctttaagggcgagagcatcaacgtattggagctggagcactttgatccgcatggtgtagatattgcattgttttctgctggcagcagagtctctgaagcgtatgcgccaaagtttgcggctgctggtgtggtagtcatagataattcttccgcgtttcgttacgaggaggatgtgccgttagtcgtatcggaggtgaacccgcatgcgttgaagcagcggccgcgtggcatcattgctaacccgaattgttcgaccatgcagctcatgccggtgctggcgccaatccacagggaatatcgcattgagcgtatcaatgttgccacctatcaatctgtgtctggcggcggccgctcggcgctggaggaattgggacagcagactgcacagttattggcgtttaaagagatcaacccacagcgatttcctgtacaaattgctttcaacttgattccgcatatcgacgattttcagtctaacggctataccaaagaggagatgaaattgatttgggagacaaagaagatccttgaggacagcagcattcaggtgaatccaacggcggtgcgtgtaccagtgttttttggtcattccgaagcggtcaatatcgaaacgcaaaagaaagtcactccggagcaggcacgtgcgttgctggccagtgcaccaggtgttgaggtcgttgatgagtggcagcctggtggttatccgacccctgtgacccacgcttccggcaaagatcctgtgtttgttggccggattcgtgaggatttatcacatccacgcggcttgaacctgtgggttgtcgccgacaacatccgtaagggggccgcgcttaatgcaatacagcttgctgaactggtgacgggcgagacgatttgagcatgctaggatttcgcaacagtggaacggtatacaggtggcggcgatggggtggttattaccctttgccgtttgcgcgagtagcaatactgatcgtattgtggtcattcgatccagaattccggctgcaccggttatattggtgttcatgaaatctatgggcaagggcgtattaagccctgtatatggcttgactgccttctttttagcgctgtgcagcaatgctgcgttggcgctggggctgggtgatattcgtgtgctttccaagccaggtcagccgctggtagcagagatcccggtgatctctaacgaggctggcgagcttgacgatgtgcgcgttgcgctggcttcgccagagaccttcgcccgggttggattggagcgccccaacggttttctagacgatttgcagtttcaattctccaaggatcgtcgtggtcgcgcggttgttcgggtgactagcaaccagtctgtgcagcagaaggcaatcaactttttgattgacgtggagtggaaacaagggcggttagtacgtgaatactccgctttgattgatgcgcctaatactgccgcagcaattgctgagccggcgatcaatgcgccgcaggtggcttctgccaatgtcattgtgcgtcctccaccagctcccagtgttactgtgcgtcccccctctcctgccgttcccgctcctccgttggctccctccatgcccagtgccgacgaggcgatggatgcagcggcgaccgatgtgggtgatgcaacagaaacagaaagtgtagggaccgcgggcactccggctgcgacgccatccgatatcggttcggtcacggtgcaacgcggccaaacactatcgcaacttgcttctcagttagcgcgccagagtgggcgtaccttggaccaaaccatgctggcgatgttgcgtactaatccgagtgccttcatcggtagcaatatcaacttacttaaacagggtgctgtgctgcgcactcccacgcaggaggcgctgagtgagcttggggctgccgaagctaaggcaatggtgcgtgaacaggctgcgcagtggcgtcaagcacgtgcaagcatcccgcagccagccgaatcaggggctgcgtcacagtcgcgtgctgttgctggtcccgatacagcgacggatcggcttgaaatcgcgccagccgtacccatagacaccaagaaggctggcactatcagtggtaccagcaattcaagagagggcgatatgcctggtggggagcaattacaacaagcacgcgaagagattgccagtcgcgacgctgagattcaagatttgcgttcccgacttattgatttggaacaactgcgcaaaaaacagcagcaattgatcgtgttgaaggacagcgagctggcagcggcgcaacagcatttgccaaaaacccagggacatagcaggttgggcaatggagcgatgatgctgttgggtggcgctgctctgctgtttatctgcatggtgttgtggtgggtgacccgccgtcccaagccttcgccgttgcctcatttgccatcacgtgaattcgactcagaggcattggttgttgcttttcctcacactgctgctgtgtcacggagtgattttttagagatgcctgatcaggtggtgcgtgagggcgaacgcatgcacgttcctgaccttactcttgatcgtgtctcggcaggtatgtatacctccgtcaatccatctgttaagcctcagacatttgtccaggtgcaagctgctaatgttgctgcgcagcaaagtcagccccaggcacagcagcctggccccccatccggggtgcgtgatcgtctggaactggcggttgcctatcttgatttgggggataaggagaccgcgcgtagtcttttgcgtgaagtggtggtcaccggagacgatgttgcacgtgccgaagcagcagcattacttaatcaaattgtataacaggccctgcctgtcggttaagctccagtgaccaggatacgatgatgcgttacgcgttgggcgtagagtacgacggcagcgagtttctgggctggcaacaattgggtgagatggggcctagcgtacaggcgacactacagcaggctttggcttcggtagcggatgcgtcggtgcgggtggtgtgtgccggtcgtacggatgctggggtccatggccagtgccaggttgtgcattttgatagtgcggttacccgtcctccacgtgcctggatattgggtacgacgacacggttaccatcctcggtggcggtacgttggtgtgtgccgacatccgaggattttcatgctcgcttctccgcgtgcgcacgccgttatcgttatcgattgttaaaccgtcaggtgagacctgcgttgcagcatcaatttttgagctgggagcggcatccgttggatgcccaggcgatgcatgttgctgcgcagatgttgcttggagaaaacgatttcagtgcgtttcgcagcgcgcagtgtcaggcgctacatgcgcgccgtgagcttcaagcgatttcggtacggcgctatgccgaggtcatcgaaatatgtgtccaagccaatgcctttcttcatcacatggtgcgcaatatcgtgggatcgttgcttatggtgggtaccggtgaacgtccgatggaatggattgcagagctgcttgcggggcgtgaccggaccatggctggaccgactgcctcagcgcgtgggctggtctttgtcggacctttgtatccggcaaagtggcacttgcctatggaagtgagtgtatgaacatttccccttaccgtacccgtatcaagttttgcggtatgacccgcgtcggagatgtgcggttagccagcgagcttggtgtcgatgcggtgggactcatttttgcatcgggcagctcgcgtctgctgacagtttccgcggcatgtgcgatacgccgaaccgttgcgccgatggtcaatgtggttgccctcttccaaaataacagcgcagatgagatccacacggtggtgcgcacggtacgtccgacgttgctccagttccacggtgaggaggaagacgcattctgtcgtaccttcaacgtgccctacctaaaggcaatcccaatggcgggtgctgaagcaaagcgcatctgtacgcggaccttgtatttgaagtacccgaatgctgctggtttcattttcgacagtcatctcaagggcggcaccggccagacgttcgattggtcgcgtctccctatcgatctgcagcatccctttctacttgccggcggtattactccggaaaacgtgtttgatgcgattgctgctacggtcccttggggtgttgatgtttctagtggtatcgaattgcagccgggcatcaaggatggcgacaaaatgcgtcaatttgtcgaagaagtacggcgtgccgacggccgcaggctgtttggagtggcctgatagggataccgcagtgccatgtgtcaccattgcgttatcttgcgtcataggatgacatcgtcttggtcgccggttcgctgacacgtcatgaagcggctaagtagcgttgctggttaaagcatcttgcgatcgttgctgccaatctaaggcagcgtctcttggtgtgaaagaagtacaggtccgtgaattcgatgcacttatagagcgtggcccgggctagccattcatggctgcttgatcggcacatcttgtcttcatcttcgattagccaacccatcctcccatgcgccactcatggtgaccggctgcgtgatggatgaggcgacgttggtatgtagtcgctagtctgtcaatggagcactgcgtcattgccgcatatgatgcacgacgggttcagtaagggactctgtgtttctctgaagccgatcagcgcgaagaatattgattctttgagtgctggggtgcgttacagtgacgacctgtttttgctggtatccgtcatgtctgatgttactgttgctaactatcatgcttttcctgatgctcgcggccattttgggcgttacggcggccgttttgttgctgaaacgttgatcgggccgttgcaggagcttgcacaggcctatgatgcggcgcgccatgatcccgatttcattgccgcttataacaaggatctcaaggattatgtgggtcgccccagtccgatctaccatgctgaacggctgagccgtaaggtgggcggcgctcagattctgttgaagcgcgaggatctgaatcacacgggtgcgcacaaaatcaataacaccattggccaagccttgctggcagcacgtatggggaagacgcgcatcattgccgagactggagccggtcagcatggcgtcgccagtgccactgtcgctgcgcgtttgggtttggagtgtgtggtgtatatgggggctacggatatcgagcggcagcagatcaacgtgtatcggatgaagttgttgggtgcgacggtggtgccagtgacttccggttcagccacactcaaggatgcgctgaacgaagcgatgcgcgattgggtgacgcatgtggggcatacgttttatatcattggcactgttgctggcccagatccgtatccgcgtatggtgcgcgacttcaacgcaattgttggccgtgaggcacgtgcgcagatgattgaagattatgggcgtttaccggatgcgatgactgcttgtgttggcggtgggagtaatgccattggtttgttccatgccttcctcaatgatgcttcggtcaggatctatggtgctgaggcggctggagacggcattgcgacgggccgtcacgcggcctcgattgttgccggtcgtccgggggtgttgcatgggaatcgcacctacgtggtgtgtgatgatgatggacagattttggaaacccattctgtatcagccggtttggattatccgggggttggtcctgagcacgcctttttggctgacagtggccgggtgcagtatgtgggtattagggatgaagaagcgttggctgcattccacttgcttgcacatactgaaggcatcttggctgcattggaatccagtcacgctgtggcccatgccatgacgttggcgcgcgatcttcccaaagatgcattggtactgtgtaacttgtccggtcgcggtgataaggatgtgcacacgatcgcggcgcgtgaaggtgtacgtgtctgagtgtatgggcatgcgtcattgcggtagggtgcggtgatagcactgtgcccattgtctggcggagaccaggtgatgttgccgtgatgccaatgattttctgaattgcaaaattttccgagatttcaatgcatcgtatagacgaaacattccgccgtttaagggcgcaatcgcgcaaggcgttgatccctttcatcactgctggcgacccctctttggaggcggctgttccggtgatgcatgctttggtccgtgcgggggcggatgtgattgagttgggtgtgccgttttcggacccgatggcggatggtccggtgattcagcacagttccgagcgcgcgttgcagcgtggtgtgggtttggcctatgtgttacagacagtcgatgtgttccgtcagagcgatgcagtgacgccggtggttttgatgggctacctcaatcctttggaaatctatggcattgcgcgttttacacagcatgcagtggcttgtggagtggatggggtgctgcttgtggatcttcctccggaagaggcggacgagatccgcccgatcttctcggcggctggtttggcactcatcgttttggcatctccgacgacctctgcctcccgtctggcgaggttgagcggggttgcccaggggtacttgtattacgtgagtttttctggcgtgactggcgctgatcggcttgatgcgcagtcagccggtgatcgcttgcgtggattacgtgcgcagactcaagtcccggtggtggttggctttggtatcagggatgcggccagtgctgcggtgatggcggtggatgcggatggggtggtggttggcagtgccttggtgacggccttaagtgatgctccggatgtggacactgcctgccggcgtgctgatgcgtttttggcgccgttgcgtcaggcgttggatgcggtgaagtaggtggttggtttcaatcagggtgcggttggatttgattgtcgggctggggttggggatgtgccggattttctctcgctgtgtgtatggggagtacgcaatgaatagcgcagcacgtggaggcgtaggcgtgggtgatgttgcgttgtccatcgttaagcggtatgtccgagtaagaaggcgtttccgcaatggggatgccttaccttacaacagtcttcatagacgtgatgttcaatagcttgcttccagcgcctgatccaggcgttctacggcgatgatctgcatgtccttgatggcactcttgggtgcgttggcttttggcacgatggcgcgcttaaagccgtgtgttgctgcttctctgaggcgctcttcgccgttggggaccgggcggatttcaccggataaacctacttcgccgaaggcgatggtcttttccggcagcgcccggttgcataacgaggaccggatcgccagtagtacaggtagatctgcggctgtctcttgaacgcggatgccgccaacgatgttgatgaatacgtcttggtcaccaacgaggacgttaccgtgacgatgcaacacggctaacagcattgctagccgattttgttccagcccgacggtaacccggcgtgggttggacagtggcgaggtatcgacgagtgcttgtacttcgatcatcagcgggcgtgtgccttcacgggtgaccatcacacagctgcctggttggttgctgtttctgccggataaaaaaatggctgatggattggcgacctctttcaagcctttttcgctcatcgcaaagacgcctagttcgttgactgctccaaagcggtttttgaatgcccgcaggagacggaaacggctaccgctttcgccttcgaaatacagcacggcatctaccatgtgctccagtacgcgtgggccggcgatgccgccttctttggtgacatggccaaccaggaacacggttgtaccggtttctttggcgtagcgcactagctgtgcggcgctttctcgtacttggctgactgaaccgggtgctgcggtcagtgtttcggtccatagggtctgtactgagtcggcgacaatcagtcgtggccgtgcgctgctggcgtgttgcaggattgattcaatgccggtttctgcgagtgcgtttaagccctccagggggagatccaggcgcaccgcacgcccggcgacctgtgtcagcgattcttcacccgtcacatacagtgtgggtagggtgcttgccatccgtgctagtgcttgcagtagcagtgtggatttgccgatacctggatcgccaccaatcaggacgaccgcgcctgccaccaggccgcctcctaggacgcggtcaaactcgccaatgccggtggagatgcgtgcttgttcgctgtgttgcacgtccttcaatgcggtgatcttgggtgggtcgagctgacctgtccaattgccgtgcttcatggttgggtttttgaccgttcctgcatgtccgagggtgatttggcttaagcaattccaggtgctgcattcggtgcactgtccctgccatttgctgtattcggtgccgcattcagtgcagacataggcaatcctggctttgcttgcggcgtttttggtcatgtgttcttcctcgtgatcggtcgacatgcagcataggttggcatggctacacgcgctatgtggatgcagtcattgctggttactaaaattaattcctaagaaaattaattaaaatatgagacatttttctcttgatttatcaagagatgtgggttcctactcgctgtggttactgagtcacttaaggatttctcccaatgattaaatcctggatgttcgagcagcttaatatttcatgcgatgcagatccggcgcatttcgatgctgtggcttgttctaaggaatatgcgtggcgcagcgaattatgggcgcagcttgagacgctggggttccatggcatctttttcagcgagcatcatttcagcggtttgcgtgcctctccttcgccaggggtacttgcagcgtgggtggcggcgcgctcccagaatctgcgtatcggggtgctcggctgggtgttgccgctgtggcagccgtggcgctttctcgaaaaggtggctgtccttgatcaactcagtcaagggcgtgttgagatcggggtggcgcgtggctcatcggtggatgaggcggctgcggttggtattgccgaggtggatatcgtgccgatgtatcgtgaggcactggatatcctcgaacaagcttggttgagtccctgcttatcttaccgtggtcgctactggtcatttgagcagcttggtatggtaccgaggccattacagtatccttccccaccgatttgggcgacggtacgtagtaccgatgctgcggcagaagccgcaaagcgtggccatcggctgtgtactggttttttgcacacggatgcgattgtgcgtttgttcgatgtgtatcgtgaggcggcagggcacatgcatactgcggaacgcttggcgattcgccgttgtatctttgttgccaagactgaagcgcaagcacgcgcccatgcccgggcggcccaggcgcagatgccatcaatgttggatgatgacattattgctggtacgccggcgcaggtgactgagcagattctgttgcaacttggacggactggcgctgcaaatatcgttggtttcttcactggtcatcgttgcgatcctgacttggtacgcacgtcttgtgatttattcggcgaatatgtgattcctgcattgcagtccgcatcaatttgatgttgcggacgcttagccacatggttgtttggatgcagatgcatggactgggggacggtcaccgcatgctgatgacgccttcagcgtattcgtttggtccagtagtgtgtggattgggaaaggctcatattctctgttggttgcctgattgaagcgctgcgtcatgaatggttgtgtgccgttcattcctacaagaacagctaccacgcaggatggggtctgtggaaccatggggtgtagtaatgtgggcctttactttgaccaaccgagagactgattccgacccggtgagcggcgcctgcatcgtcgtaataggttttgcaggtgttgaggttggctgcttgccaatgactgttgcccccacggttggaatagcccacgccggtactgactgcgccggataatttaccttcgcaagtgtgttgaccgaccaagccaatgttttttttgtcggtgattgcggcagggatgccgctggtgtcgccatagtaggttccagaaggaacggtgttgcttgtgggatcagcatggtattggatgggtaactccggtggcgtcaggtcgagacttgacattgaagtcgcgttggtgtgcggagtagtggcgcttgtttcgggttgcgccagagcggggccactaaagatgagactgaaaagaaggacggtatgggttttcatgatcttgggggatggagtggaggatggcgatccctgtcgagtcattgagcaatgttggctatggaacttggagtggcatcggccagcgctctgcatccttcagggagaatacatggattggttcacccttgcgcaagtacgagttcaattaactgatggccatagcgtgtcagtttgttgttgccgatgccgctgattttggtcagtgcattgaggttggtagggcgttgctcggcaatatggcgcaaggtgctgtcatggaagatcacgaatgccggcacgttttgttctttggcgagttgtgcacgtaagcgatgcagggcattgaagagtgccagatcttccgggaggaccgatagtccgtgacgttggccggtgcggtcgcgttcacggatgaactgatcccgtcgcatcatgacttggcgttcgcctttgaggactggacgactgcttggggtcaggcgtaagccgccgtagccttcgttgtcgacctccaacaggtgtgtggcgacgagttggcgaaagacactgcgccagctgcgttcatccacgtcactgccgatgccgtaggtgctgagttggtcatgacccagttgcaatattctttggctcttactgccacgtagtatgtcgatgaggtggccaaccccgaagcgctggccagtgcggtagacgcaacttaacgccttttgggagagcacggtggcatcccaggcggtggctggggttaggcagttgtcacagttgccacaggggtttggataggtttcgccgaagctggatagtaagagttggcggcggcattgcattgattcgcagtagcccagcaggtgatcgagtttggcgcgttctacgcacttgcgtgcttcgctggcttcgctttgttcgatcatttgtttcagcagtacgacgtctcccaggctatagcacatccatgcttctgcagcttcgccatcgcggccggcgcggccggtttcctggtaataaccctccagtgatttggggaggtcgatgtgggcgacaaagcggacatcaggtttgttgatgcccatgccgaaggcgatggtggcacacatcacaatcccttcttcacgcagaaagcagcgttggtgtttggcacgtgtttcgactggtaggccggcatggtaaggcagtgcgttgtagccttgtgtacacagataggcggcgatttcttcggttttgcgccgtgacatggcgtagacaatgcctgcggtgttgcgatggcggccgaggaactcttgtagttggcgccgcatattgtttttctgcacgaccgtgtagcggatgttggggcggtcgaatgagctgatgaagtgatgcgcatcgcttaggtcaaggcgctcagcaatttcgcgttgcgtgggtgggtcggcggttgcggtcagtgcaatccgaggcacgtgtggccagcgttcatgaagtacggtgagttggcggtattcgggacggaaatcatgtccccactgtgagacgcagtgggcttcgtcgatggcgaacaaagcgatctggctacgttccagcagcgataagaagtgtgcagtgagtaaccgttccggagcgatatacagcaggtctagatctgcggtgactagagcgtgttcgatccgttgtgcctgcgttgcatctagggtcgagttgagataggcggcgcgtacgccaagctgacgtagggtctcgacttggtcttgcatcagtgcaatcagcggtgagatgacgacgccgatgcctttgcgcagcagcgcaggcacttggtagcacaatgatttgccgcccccggtgggcatcaggactaaggcatcgtggccggcagcgacatgctcaatgatggcttgctggggtccacggaaggtgtcgtagccgaagacgcgttgtagaacggtctgggtggcggaagacgtgctcattaggcttcttgccggttgggggagatagcatttctgcggaactgccctggtgccgggaagctcaatacagcagagtgtgcggttgtgctgcacactcccaagtgagcggatggtggtctgcatggagtgtggcattgctgcaatgcgaggccagccgccttgacgctacattgcagcaattattgcaatagcgaacgcaacatccacgcgtatttttcatggatttgcaggcgttgggtcaataaatcggcggttggatcgtcactgccatcttcagcagtgtcgagtaccttgcgtgcggtacgacagaccgcctcgttaccgatgaccaattggcgaaccatttcgcgccagtcggtgttgtcgttcaagcctggttcttccttgattgaggttagttctagatagtctttgtaggaacccggtgcgttataaccgagggcacggatacgttctgcgatctcatccagtgcggcccattgttctgtgtattgcgtttcgaacatggtatgtagcgagttgaacataggtccggtgacgttccaatggaaggtgtgggtcttcaagtacagtgtgaaagcatccgccatatagtgggacagcccttcggcgatggccttgcggtcgctgttcttgatcccgatattgacgtctggcattgagatggcagatgtcaattcagttttgttctcggatttactgttttgttgttttttcgacatggaaatatcttccttagataagcggtggcgcattgtcgcaataaacaagctaaagcatgtactgtcatgcgatcttctgcaatttacgattgatgagcgttatcgaacagaacattttgggccaattgcgtcagcatcgtcgtgcgattgacgatgcgatgacccgtgatcgtggcaggttgctgggcctatggtcgcgttggcagagtcagccgcgtgatcatgaggcgcgtgctaacttccagcgggtgttatctgcatcacgggcacagcgtcaggtccgtgagaataatcagccagtggtcacagtggatacccgtttacctattgcacaggaagcagagcgcattgtcgcgctgatgcgggcgcatcctgtggtaatcattgctggtgaaactggttcgggaaagaccacgcaattaccgaaattgtgtctgtccgctggacgtggcattgccggtacgattgggtgtacgcaaccacggcgtattgcagcgcgtgcggtggcaacgcgggtggctgaggagctgcaaacgcccttgggaatggtggtgggctttcaggtgcgttttaccgagaaggtcagtgatgcctcaaggatcaagttcatgaccgacggtattttactggcggaggttgccagtgaccgttggttgtcagcctatgacacgatcattattgatgaagcccatgagcgcagtctcaatattgattttttactcggttatctcaagcagttactgaaaaagcgtgctgatttgaaggtgatcgtgacttcggcgacgatcgacacggcacgcttttccaagcattttgatgatgcgccggtgattcatgtggctggacgtacctacccggtggaggtgcgttaccgtccgttggatgcgatgtgggcttctgatgatcgcccgggggaaccctacggcggaactgagtccccggctgtgaatcgttgggtgggaggatctggaggtgacggcgcgttgtcaaagcccatcgaggtggtgcctcaagaggatcagcgtactgtcaatgatgcgattgtggcggtgatcgacgagatcacccgtgaggacccgcacggtgatgtattggtgtttctgcccggtgagcgtgagattcgtgagctgtatcgggtactggagcggcgtaagtatcgtgagacggaactgctgccgttatacgcgcggttgtcggctcgcgatcaagatcgggtgttcaaccccggctctgggcgtcgcctggtgctgacgaccaacgttgctgaaacatcattgacggtgccccggatccgctatgtgatcgatccgggctatgcgcgtgtgaagcgctacagtgcgcgccagaagttggaccggttatacattgagccgatcagtcaggccagtgccaaccagcgtgccggtcgttgcggccgcattgccgatggtgtttgttaccggctctatagtgaggaagactttcttgcacggtcggcattcaccgatcctgaaattcggcgctcctccctggccggggtgattttgcgcatgttgcagttgggcctgggacggattggtgggagtgctgcttccttgagcgagcctgtttcagggccggagcagcaacacacctcctggatcattgaaagtttctcgtttctggagccgccggatgaacgggcggttgccgatggctggcaacaattggtcgaattgggggcggtggatagtcagcatgcattgactgcgatcggccgcgagatggcacggttgccggtggacgtgaagttggcgcgcatgctggttgctgcgcgccagcacggctgtgtgtatgaaatgacggtgatcgccgcttttctgggggtccaggatccacgcgagcgtcctccggatgcgcgtgaagcggccgacaatgcgcatgcgaagtttgccgatgcacgttcggagttcgttggtatcttgcgtttatgggaggcttaccgccagatccgtgggcatatgactcagtccaagttacgccagtggtgccagcgtcattttctgggctttcttcacatgcgcgagtggtgcgagttgcagctgcaattgtcgctgttgtgtgcgggggagcaggcggagcagccacgcaaggggcgagtggcggcggcctttccgaaggagggatgcttaccgtctcagcgatcaaagccaggggccgaggcagggaaggtcaacgagttaccttcaagtgcgactgtgttgcaggcactgttagcggggcaggggacctctactcagagtgaacatcgtggtcatacaccgagtcgtggtcagctgcatcgtgcggcgcgcttggcgcgcgagcgtagcgcggttcccaaggtgactcagaacacccagagtgtgaaggcggttgcagggcagagtgtttctcatgccggtatgcaggcgcagtttgcggtgccgcctaatgatgcaccgcatatcggtgagcgtgagcgtgcggctgcctatcaggcgttgcatcgtgcgttgctgactgggttgccgatccagattggccatcgtaccgagaagggagattttcaggcgccgcgccagcgccgttttatgttgtttcctggttcgatgttggcgaagaagccgccaccgtgggtgctcgcagcgaacttgctggatacacaaaaggtgtggggcttgacgaatgctgcgattgagcctgattgggtgattgctgaattgccgcatctgttgctgcgcaagcatttcaatccgtattggtcccgtacccagggccgagtgttggtgtctgagcagattagtttgtttgggttgctgttggcgccgaagaagccgatgcactatggccgcattgatcccgtggcggcgcatgatctttttgtacgccaagggttggtgatgggggagatcaacacgcgtgccggttttgttgctgacaatctcaaggtgttggagcaggcgcatgaggaggaggctaagttgcgtcgtgccggtattgtggccgatgaggattggcaggcgcgttggtattttgaccgggtgccgagtgacatccatacagccgatgcactggattcctggtggaaggggctgccagtggagaagcggcacggtctgtattggtcattgatcgacttgttgcctggcgaagggggggaggaggatcgttatccgaagtattttgcactcggggatgtgaggttgccgctgcactattcgtttgatccaggtgcagtggatgacggtgtcactttggatgtgcccttgcatctgcttaatgcgctggatccggtacggttgtcgtggttggtgcctggttttgtcgccgataaagcggcggcgctgatccgttcgttaccaaaggcgctacgccgcagttatgtgccggcgccagattttgcccatgcatttgctcaagcgttccagcagccttcggccgatgagatgcgtggtgagttagcacgctttttgtcgcgtattaccggggtacgggtggcggcgatcgattttgatgaacagacattggaaccttatctgcatctgcgtgtgcgtttgcatgatgagtctggtcaggttttggcagagtcgcgcgattttgatgcgttgcgtgcccgttttggtagccactcgggcgaggcgttcgtagcccgtgccgggcgcacgctcatcatggaggagctacgcgagtttcctgctgtgtcgattccgcttcagctcactggtgaggctggggttccgatgtacccggcgttggttgacgatggtgagatggcggtgttacggatttttgctgatcccactgaagccgcacaggtgcatccacatggcgtacggcggctcttggagatcgccttagccaacaagatcaagcaggcgcgcaagcagttgccggtgtcttccaagagtgggctgttatatgcggccattgagtcaaaagaatgtttgcgtgatgaccttgtcaaggcggcattgaatgcggtgttggctcatgggttggagtcgatccgtgatcctgttgcgtttgcgcagtgccgtgatgtggcggcgcagcagcttttttctgaggcgatggcgcgactcagtttggccgaggagattttggctgccgtggctgagctgaagccgttgctggaagcaccgttgatgggctgggcgcgtggcaatctggatgacatggaacggcagttggcgcagttggtgtatccaggttttttgcgtcaaacacccgccgatgtgttgacgcagtatccgcgctatctgaaagcgatgatgatgcgcagcgagcgcgctaagcgcgacccgtcgcgcgatcaggcgcgtatgctggaactcaagccatttttagatgctctggaagtggcaatggcacagggtgtctccgacacaccggggtgggagacattgcgttgggatgtggaggagttgcgggtttcactgtttgcccaggaattgggtgtacgttcggggatttcggtcaagaaattggcgcagcggttatccacgctgcgctgatggagaaggtgctcactgatgttcaggtagggtgctgcaggcagtactggttgacggaggggccgtgacgggatactgctgctgaccgaggatatatgctttgctggtagcgatgaagccatcggggtagctggtctcgacgaagtaggtattccaaccctgggttggaatagtgaggttcacacgcaacgatcgaccctgctcctgcagtgatgtgggtacataacggatgccgcaggtgtagcggaaatcgcgtgcttgcgtgttttgggctgtccacagggtccagcgtagcggttgctcgctcgaatgtaggtacaggaccgcctctttacggcgttgttgcagatgttcgtttaacacgggcaacggacgcccttgctgcagacgtcctaggaagctgatcaggctctcgcggattgtagcgggagagatggcatgggaactgttgggtatcatgcgcagtgcttttttaccggggaggagatcgtaataatagtcgctgctatcgggcgggaataaatcgtcgccgctagcattcaaaatatatttggttaacgttaggcggcggaaatagcgcgtttttaaatagcttaatggatcctcaatccgcattaattgcttaaattgtggagtattcaagcgattgatgacgttctcagcgtagtagggggcgagcccgatgggccagttgtttccgtaattgcgataaatgtgattcagcacattgcgtgtgtttaagatgtcggttactgcaggaatgattgtatttacgcgctggtctgcaatcgctgtcagccaagcggcccagccacgcttggatgtcccggtcaccgcaaagtgttttatggacagttgtggtagctcgtgttgtgccaggtccattgcacgcgtggtggcgatcaccatcggtacatgtaaaggtagtgtttgacgagtctctggtgactgcatgaagagtgaccagctatgtgcgacactctcgtcctcacggcgtgcgcgaccgtcgtctgtataggtcaggtattgattggggatgtcgctgacctccacgatcggcatgtgtgtacgccgtgcgatgtcagacagtatctcggaaagatcattgggtgggcgcaccgccataccgttgtctggatatcgggtgccgttactgatgatgagcagtgcttgctgtggtagcacatcgtcgggtatgtaaagcacgacgttgtgttgccatagtgatggtgtcaccagttgttctggtgaccaggactgcgaggtcagttggtagcgcttttgagtgatgcccgcaatgtgttcactgccggtggcagtgtattcgagcggctgctgctccactgcatcgtgatagcaaaccagtgcgtcagtggctgcagtatggtgcgcgttctcacagatggttggataagagagagaaggtgtcgctgttgcagtgccggctagtagaagggtgagagtaagagcgtgggtttggtttcgcatggcatgtaccaaatgattgtccggtagtggattaagattcagtttcctacaaaggtatgggatcaatttgtaacgttttcttcagttcttcaatgcgttgtcatggcacgcaatatttctgtgatgtatcaagcatttcatggggtgcgtcgagagatcgagaacggctcggtttaatcctattcgggtgcgtggctgaagctataatcacctcgcttcatggcgaggaaggcgcaaggttcgtcattgctcagcttgatgttattcgcagcacacctgtggagacgccagtgctatgccgtgttgaaggggtgcgagaagcaggcggattggcgcttgcttggttttcaaagtctcaggcaaaaggagagagcgatatgaagattgctccgttacggtacgtcggtgtggcgtgcgggtgccattacaaggtgttcacgtgttttcagtctcccacttttgttcaggaagcctcatgatgtctcacaccctatcttctttgcgtgatcttgaatatcagggtgcgtttgttgagcgccatatcggccctaatgatgttgagatcgcgcagatgttgcgtgtcgttggctacgattcgttggagtcgctgacggatgccattgtgccggagaagatcaggtcaaccgttgcgttggatttgcctaaggggatcacggaagaggaagcgctcgccaagattcgggtgattgccaataaaaatcgagtgtttcgcagcttcattggtcagggctactacggcacgcatacgccgaaggtgattttgcgaaatgtccttgagaatccggcgtggtacacggcgtataccccgtaccaggcggagatttcgcagggacgaatggaagcgctgatcaactttcagaccatgtgcgctgatctaacagggatggagatcgccaatgcgtctttgttggatgaggcgactgctgcggccgaagcgatgagcttggccaagcgttcggcgaaatcgcgctcggatctgttttttgtgcacgatgcggtgcatccgcagacgttggagttactgcgtacccgtgccgagccgttgggcattgtgttgcgtgtgggcacgccggaggaggcgttgcaggccgatgtgttcggaatattgttgcaatatccagataccttcggtcgcatcggtgatcacagggtcttggcggatgccgtgcatgcacggggtggattggttgcggtggccagcgatctgttggcgctgacgttgattacgccaccaggcgaatggggggcggatattgtcgtaggcaatagtcagcgctttggcgtgccgtttggctttggtgggccgcatgctgggttcatggcatgtcgcgatatatataagcgctcgataccagggcgtttgattggtgtctcggtcgatgctgccggtcatccggcgtaccgtttggctttgcagacgcgtgagcagcatattcgccgtgagaaggcaacttccaacatctgtactgcgcaagtgttgctggcggtgatggcctctatgtatgcggtctatcacggccctcaagggttgctccgtattgcgtggcgtactcaccgcatggcggcgattctggcggcggcgttgcgtggtgccggtctgactgtcggtgagtatttcttcgatacgctccatattgtcggtattgatgccgtggcgatccattgtgcggcggcggcggctgggatgaatctgcgcatgattgataatgcgcagcttgggatcagtctggatgagacggtcacccgttctgacgtggtggctttagggcaggtatttggtgtgcaggtcgatgtggaggcgcttgatgcgatcactgccgatgcgttgccagcggggttgttgcgcagcagcgcatttttgacgcatcccgtgttcaatacgcatcacagtgagcatgagttgctacgttatttgcgcatgttggccgataaggatttggcaatggatcggaccatgatcccgttggggtcgtgcacgatgaagctcaatgccactgctgagatgattccagtgacgtggcaggaatttgcttgcattcatccattggctccggcggtgcaatggagcggctatcgccagttgattgatgagttggaggcgatgttggcggaatgcactggttacgatgcgatcagtttgcagccgaattctggtgcacagggtgaatatgcgggtctgttggcgatccgtgcgtatcaccgttcacgtggtgaggaacggcgcaatgtgtgcctgattcctgagtcggcgcatgggactaatccggcgtcggcgcagctatgtgggatgcaggtggtcattatcaaatgcgacagaagcggtaatgtcgatgtcgatgatttgcggatgaaggcggagaaatattcagacagtctcgccgcgctcatggtgacctatccgtccacgcatggggtgttcgaggaggcgattactgagatttgtgagattgtccatgcgcatgggggccaggtgtatacggacggcgccaatatgaatgcgttggttggtgtggcgaaaccggggcgatggggttcggacgtgtcccacctgaatcttcataagacgttttgtatcccgcatggcggcggtggtccgggtgtaggtccctgtgctgtgaaagcgcatttggctccttttttgcctaaaacgttgccattgccaggagacgcagcgggattgccggttcagggcacgcaagaagccaaggtcggcatggtgagtgcggccaattttggttcagcgtcgatcctgccggtgagttggatgtacatcaccatgatgggggcggcggggttgcgtaaggcgacccaggttgcgttactcaacgcaaattacattgctaagcgcttagcacctcactataagacgttatataccggccgccatggtctggttgcacatgagtgcattcttgatgtgcgtccgttggagaaggtgagtggtgtcagtgccgaagatattgctaaacggttgatcgattttggtttccatgcgccgacattgagtttccccgtggcgggtacgctgatggtggagccgaccgagagtgaatcgcagcaagagttggatcgttttgtcgatgcaatgattcagatccgtggggagattgctgcgattgagaaggggcatcttgatcctgaggataatccgctcaagcaggcgccacacacggcggtacaggtcatggcttcgcaatgggggcatgcgtattcgcgtgagttggctgccttcccattgggcgtgttgcaccatgccaaatactggcctccggtagcgcgtgtggataacgtttacggtgataagcacgtgatgtgtgcctgtattccggtagaggcctacaaggagaaagaggattctgaaatccagcatctgattgaggaggatgcatcccgttgctgacgttgttgcaatgcaggccaggcgttttgatctgaagaggataggtattgataaaaacgctttgcgttgttgtcttggggcattgttgtcatcctttcgatgctgggcacactctgtagcgtgacattggtggtctgcggatcaatgtttgaaagcagccgatcaagcaacgggtttcactctttattgcatatccgctactacgccttgtaatttttcatgctctttggtccatgagccatgatggatgacatcgtcttttcagcattggatcagctaagtacgtggccgtttggcgataatgcgatgagcattaaaaaggccccagatgatcaagggcctttttagtgagtggtacgttgttttcaatacatcatgtggatgttgaggttatgcatcacccacagtgaaccgacgatgacgataccaatgaccagcaatgaaaacagcgctacatggacgttggagcgttgttcctttgagcggtccatgtgaagaaagtacacaagatgcaccagcatttgcaccgctgccaacgctgaaaccagggctacgctggtctctttggagaaactgcgattcatcactatcgcaaatggaatggcagtcaatatcactgccagcacaaagccgatgaggtatgacttcaggtgagtgctttggctgggtgcggcaggctcgctggagtgatgggggtgatgagacattacagcgctcctagcagatagacgatggtaaagacaccgatccagatgacatccaagaagtgccagaagaggcttaaacaggccaagcgggtgttgttgcgtggggtcaggccattcttaacaatctggatcacgagtatcagcatccatagtaagcctgaggcgacatgcagaccgtgggtaccgactaaggtgaaaaatgcggatagaaacgcgctgcgtcctgggcctgctccttcttggatcagatggtgaaactcgtagagttccatgcccaggaagccaagaccaaatagggcagtcaccatgagccagccatagagagcaggtatgtggcgtttgtgcgccgcaatcatggcgaagccgaaggttaggctgctgaacagcagtaggaaggtttctatcagcacgaacttgagatcgaacagttcttttgctgttggtccatccactgtcgcaccgaccaggactgcgtaggtggcgaacaggcctgcaaagatgagacagtcgctcatcaggtaaacccaaaatccgaagacagtgttgtctccagtgtcgtgatgtgcgtgatcgctgttatgcatatctatctttgtggaaatgggcataggggttatacagccttcgcagcaggtgctgtttgtcctttttctagcagtgcgaagcgttcgttctcgatacgcgccacttcctcggcagggacccagtaatcaatgtcgttatcgaagctgcgggcaatgaagctaccgatcatgccaaccagaccgagtattgccatccaccagatatgccacgtcagagcgaagccaagaacgatgctgaaggcgccgatccagaagccggctgcggtgttgcgtggcatgtggatatcctcgtatttgtctggttttttccaggctttgccacgctgtttgtcttcccagaattggtccaagctgtccacatgagggacgtgggcaaagttgtagaacggcggtggtgaggaggtcgaccactccagtgtgcgtccgtcccaggggtcgcctgtcaggtcgcggttttgcttgtgtgtccagaggctgtaagcgaattgcagcagatttaagaaaataccgatcccaataatgacggcaccgccagctgcaacgagtaaccaaggctcccattgcgggttgttgtagctatttagacgacgcgtcatacccatgaagccgagtgcatacagcggcataaatgcgacgaagaaaccaacgatccagcaggcaaaagaggccttgccgagtgtttcgttgagtttgaagccaaatgctttagggaaccaatacgttatgccggccaaataaccgaacacggccgcaccgatgatggtgttatggaaatgcgcaatcaagaacaggctgttatgtagcacgaagtcgactgcggggatggccagcatgacgcctgtcatcccgccgatggtgaaggtgatcatgaaaccgatggtccaccacatcggggcgctgaaatgcacccggccacgatacatggtgaatagccagttaaatatctttacgccggttggaatcgagataatcatcgtcgtgatgccaaagaaggcattgacgttcgcgccagaccccattgtgaaaaagtggtgcagccaaacaataaacgacaggacgccgatgcatgaggttgcgtagaccattgaggtatacccaaatagcttcttgcggcagtaggtcgcgaccaattcggagtagatgccgaatgctggcagggcgaggatatagacctcagggtggccccagatccaaatcagattgacgtacatcatggcgttgccgccgccgtcgttggtaaagaagtgtgtacctaggtagcggtcagcacccaacaatgcgagtgtgacggtcaagatagggaatgaggcaatgatcaggatgttggtgatgagtgcggtccaggtaaagaccggcatacgcatcagggtcatgccgggcgcacgcatcctcatgatcgtgaccaggaaattaatgccggtcagcaacgtacctaacccggaaatttgcagtgcccagatgtagtagtccacgccgacaccagggctgtattccaattccgaaaggggtggataggccagccagcctgtctgtgcaaattcaccgacggccagtgagatgttgatcagtgccgcgccgcccacaaacagccagaagctgagggagttaagaaatggataggcgacgtcgcgggcaccaatttgcagcggtacgatcaggttgagtaggcccgtcatgagtggcatggccatgaaaaagatcatgatcacgccgtgggcggtaaatatctggtcgtagtggtgtggcgggaaaataccttcgttaccgccatgtgcgatggctaattgggtacgcatgaatattgcgtcggcaaagccgcgtaacaacatcaccagcgccaccacgatatacatcacaccgattttcttatggtcgactgaagtcagccactcgcgccataagtagccccatttcttgaaataggtgatcgcaatcatgattcctaggatggcgagactgccgccgccgacagcagtcaaaacgattgggtcgtgcgggatcgcatcccacgaaagcttgcctaacattgtttgcctccagaagtgcacatgctcaccgcatctctcagcgataacgtgtgctcatggtgatcgtcgtgatcgtcggtgtggtggccatgccccatcatgtgtttatcgatcagtgacttaaacagtccgttctctaccgatgagtagtaggtgaccggataatcgcttttttcgttgcgatcatctgccaatgcttgatattcgtcctgttgtagttttagcggtgaggttttgactttggcgatccaggcgtcgaatgccgcctggtcggggagcacatgcactacaaaattcattttggagaagccatggccgctgtagttggccgagataccgcggaatgttcctgtctcattggcgatgagatgcaatttggtttgcatgccggccattgcgtaaatttgtgagcctagttgcgggatgaaaaacgagttcatcaccgtatcggaagtaatcttgaaattcaccggggtgttgattgggatagcgatctcgttgactgtggccatatcctgttctgggtagatcatcccccacttccaatccatcgccacgacttcaatggtgatcggtttaatatccgattgcaggggtttgtgagggtccagtgagtgtgaggagcgccacgtcagtatggccagcaccagaatgatcaaacacgggattgaccataccacgacttcgattgcagtggagtgggcccattctggttcatagcgcgctttggcgttggaggcgcggtatttccatgcgaaggtgatggtcatcacgatcactggggcgacaaccagtagcatcagcgcgacagaaataataagtagtgtcttttcttcctggccaatttgaccctttgggttcagaacggcccagtcgcaccccgtgagtatcaggaggagcggcaacaggagtaccaggtggagtaactgtctcgtttgtttcgaggaaatcattggtcaatccagttgcaaggaagcatcaattgcagctctgagtgcgatttgtcattggtcacgcgggagactgcggtatgagcagcagtggggttacactcagatcagcatcacaaattctatgccttgctgcgatccatagaaaggtacccattatgatctgaagtcgaaattgttgttggttggctgcgacatgtcgtcgcatctgtggagtgtatctatgtttggtgatgcaaggtgcctggattaacaaaggaaatcggattcatctcagccaaacactgcttgagctgttatcagacgtgggaggcaaacgggcaataattttgcgtttttttaatactgacaaaataatgccgagaaacatatctgcccggatcgaatagtttctctagataatgtgagatggatcgggttctttacttgggcgatgtcaatttccggtgtttgagttgccgatacttcagtaggttcgttggatagcgtagcgggccaagccgcgtaacgcggccactgcttcggtttcgagcaggccgtctagtgcgcgttcggcggtggccgcatacgcgctggcgcgttgccgactgtagtccaagctgccagttgtacggatcgcgttcagcacttctggcattgcatccctatcgcctttgctgatgatcatgcgcaaacgttcacatgtggctgcgtctgagtgtgtcatcgcatggatcactggtaaggtggctttgccttcggcgagatcgtcaccgagatttttgcccagttggctattgttggcggtgtagtcgagtacatcgtcggtgatttggaatgcatagcccaattgcattccatattcgtacatacgtgtttgtgtttgcgtatcggcatgggatgcgagtgctccgagttgtgctgcggcagcaaacaatattgccgttttgcgctcgatcacgcgtaggtaggtggtttcgtcggtatccgggttgtgtacgtgcaacaattgcagtacttcaccttcagagatacggttggtggtttcagccaatatctgcatgacttctaggttggccaattcggtcatcagttggaagctgcgcgaatatagaaaatcgccgacgaggacgctgggtgcattgccccatagtgcatttgcggtactgcgactgcggcgcagttccgatccgtcgaccacatcatcatgtagcagtgtggcggtgtgtatgaactcaatgatggccgccagttggtggtgatgagggcctgtggggccgatggcgtggccagctaacatcgttagcatggggcgcaggcgtttgccacctgagcagatgatgtgatcggcaatttgattgatcagcacaatgtctgaggtcaggcggtcgtggatcagcgtatcgattgcagccatgtctgatgctgcgaaggattgaatctggggaaggcttagggctgtatggagagtggtggcaatgctcatgcggaacagaaggtacgtgttgtctgaattataggcgtctccacgcgatccgttctgaaagtgggagcgcgtctgtcctgatttacttgccgttgggttttcccgacagatagttgttgcttttactggtgctctgtcatgtatttttggatatccgaatgttgttaggggggtgtagaatctccttcaccctttaagaactgtttgcctgaccgttttagggttggcaaacgatagtggaatattaaatggcccgtggtatcaataaagtcatcctcgtcggtaacctcggtaacgatccggatatcaaatacacccaaggtggtatgacgatcactaccatcagcttggcgacaaccagtgtgcgtaaggacaaggagggcaatacccaggagcggaccgaatggcacagggtcaagtttttcggaaaactcggtgagattgccggggaatatctacgtaagggatcacagtgctatatcgaagggagcatccgctatgacaagttcactggccaggatggtcaggagcgctatgttaccgagatcgttgctgatgagatgcaaatgttgggtggccgtagcgatggcggtggtatgggcgggggcggtgagcgcccgcagcgtcaaacatcgcagcgtcaggattacgccccacgtcgccaggctcggcagccgtcacagtcgccgcaatcttcaccgccgccgatggacgatttcgctgatgacgatattcctttctaagaatgcaatgcgtctaggtgatcgtagggcgcttgggtttaatgcccattgagtctgggtcattggctatatggcgagttcgtaaaaatcatcatgttattttagtgcctctatggcggcggtactacaccatgtacccgccgcgctgttataaccgattaggttggggggtagtaggttgcaatgcgggtatcactggaatgagttaccgccagaatgatgttgcgcggatgatctaggttggcgcccgggtattaggtgtctgtgttttttcgatgagtgatgaaatggaatgcggccaagctaaatgtggcgatgttgcggtcgccgattcctgcgctggtttcgatacggtttccaggatcgatgtcatagggaagaccggtttgcagtgatcagtcatctgtgggtgaccaatcgtgtgttagttcagtgttgacgaggacgcattggttcgattggcatccctggatgctgccgaatgcgctcaatccccagcctggggcaagtcagattgctttgcagatccattgtgctgtgcaggcttcctaggtcatccgtagggaaaggcttagtgttcatccgatatagcgagagatggagtgtgtttaaagagattattagtcacgttactggctaatcttacattggcattggaagaataattccaaatattattttttgttgttgtatctaggagggggaggatgcgctgggtttatttgcggtggataaggagttttgtttacaaccattggatagtgattggttattccgcaaatgatgggaatcaacttcacgtaccaagatattgttagttctaaagtctcagtgagtgatgttgttgaaataaaaaataatttaatgagatgttatttaattgatgggttgaataatggtagcggggtcagtggaaataatgttgttagatcgaattatttattttactgtggatgttataagtgctagtgagtatgaccctttattttaataataattttttgtgttttagaaattagaacgggttgtcatttgaattaaagataatttcggtgtttttactctctgtctcaggggggtgttttgcggattaatgagtgatctgcaacgagtagatgtagcgtgttctgttgctttcacttggtgttgaaagtcgagcacaatggtctgtatggcgtgtcatgcttttataaatatttagagatatttcgtgaagagatagtgatgtgtatcggagtcaaatcgttgatatatggttgagacgcttgtttgaaggcgtttgttgcagtttttaccctaggtttctggtggtactgtgagtttgcagtgtggggtactttttcacgtgatggtgatctgccttggattaatttatcgaatcaatgtgagtgatgcctgctgtcgctaagaaggtaagcagaggaggtgttgtgtggagctgtgctgtgtttggatgttgtttcgagatgagttgtgtccagtccaagatggttttagcgttatagtgaatctgttttttaaagggtggtctgtcatccattgaaccaagcatatttgggttgatactgccgtaatgatccaagatggggcgtattccgggggagctggtatagatggatatgaataatttggatggacagggtgaatgtgggcgcagcgatacagcgtttccaaatttcattgcgtgcggtattgctgatgcgggcgatgcgacacagccgtttcaggttaaacccacgtttgacagtgtgtggtccaatgatgatggggcctgcggcaacaatgtgctaattcagcgcctgcatgtttcgctgagggaggccgtcgctgcagagttgccagtgggtgcacgcctcattgatttggggtgtggtaccgggttggatgcgcaggcatttgcacaacgcggttatagggtgatggcgattgatggcgcttctgcgatggtcgcgcctgcgcaccagcgtgcgcaggcggtgggtctagaggctcggttgcaggttgtacctgttgggattcagcacattgatcaattgcgtggtgaattcgatggtatttattcgaattttggatccttgaatcatattgaggatttaccggcggtcgctgttgaatgtgcgcgtctgttgcgtagcgatggttgtttggtgttttcggtgattggccgcatgtgcccgtgggagatgaatgaggacacgctacgtggtcgtttgatgcaggtgagtatgcgttttgcgtgtggtgccgcggcgttgcgtgtgagtggggaaatggttcggattcgacgctatctgccgcgtgagttctatcgggtgtttgaagcttatttttctttagagtattaccgtccgttgagtgtgttcttgccgcctccttatttagtaggtttgtatcagcgctatccgatgttaggtcagtctttggtgtggttagatgatcggattgccacgtggcctttgttgcgtgacatgggtgattactttcttatcgtgatgcgtaagcgttcgacgtgttgttatgtctgatgtgtttggtgctatccattggaatgctgttctagatcggcatgtttagtgtagatggcagttgctttatttatctgtaagtcaataagaaaataataaataaataaattgtttcaaatgggtgtgctgtggttacttatatttttctttagaatcagttttcctggattgagatgcagtgtttttttcttggtttattcaggaataggccgatcctggattgaggttttatggatggcgccatgagggcgcagtgctgaggactcattggtgataccaattttagatgctgacgaatatgacgttatcgatgaatcgtgaattgatctatttgatgttgatttttgctctgttggtgattccgcgtgcattacagcgctttatggttcctgcgccgctgacgtgtttgttatttggaattggcacgatgttagtgatggggggacaaccacatgatgatgtgattgtcttgctgagtacgctaggaatttcttcgttgtttttgtttgctgggttggaggtggatctgaaggcgttgcggcgtgaactatggccgctggcggtgcatttgctggtctatagtgttgcgttgttctgtttgggttggttggtgtggcgctacgtgggtttgacgtggcaggtcgctggcctgttggcgttagcgctgttgactccatcgcctggtttcatcatcgattcgattgggcgtttaggcttgaatgagcatgagcgtttctgggtagtgaacaaggccattgccagtgagttgctggctctgacggtgttgtttttcgttctgcaggcatctgatccgtggcaaatggcgttgtccagcggtgtgttggtagcgttgttggtgtgcttgccgttgttgtttgttactttggatcgctgggtggtgccgcaagcgccaggctcggagttctcgctgctggtcatggttggaatgatcgctgcttacgcaacgtacaagattggtgtttattacttggtgggtgcattcattactggtttgattgcgcgtttgttgcaccagcgtatgccgcatttggcttctgaggaaaatttgaatgcggtacgtttgtttgcttcattttttgtaccgttttatttcttcagggccggtaccaatgtgtcgccacaggcactgagttttgaggcattggggttgggtattttgataacaatggtggtgctaccgctgcgcattgcggtgatctgggtgcaacggcgtgtgctgttcggtaagggtgaggattttcgctccagtttgagggtgtcgttgactttggtgccgacactgatttttacattggtactagcgggcattttacgtgatcgtttctcgatctcggaggtattgtttggggcgttgttgttgtatgcagcgtttacgacgttgttgccgtcgttgattttccgtctgttgtcggctggggggggggcttcacggtctggtgatcaggcgtcgcgggagacattgccatcatccggtatgggggggtgatcttattctggtcagtgtggtttcaatcgcaagcgttatttatggatgcgtctattgatgggtgagcaaggggcaggggattaagtgagcaggcgacgtgagcaatgatggtgtgctgcgtgcagtttcttgggtgagtgagggatggtgtctgtatgtggtggggtacgctgcgattatggcagcggtgtgttggagatgatttctacccagtagccgtctggatctttgatgaaggcgatgtttttcatgcggccatcggttaggcgtttttgataaggcacttggagtgtgtcaaaacgggcgcaggcgctgtacagatcgggcacggagatgcagatgtggccaaagccgcgcggttcgttgttgccgtcgtggtagatctgtccttcttgggtttcggttccgtagttgtgggtcaattcaaggactccggggattccggacatccacaggcggcgttcggcgtcattgtctgagatgtgtaccgtctggggtaacagtgcgaggaagtacaggctgaattgtgcttcggggaagtcccgttggtcgatcaggcggaagccgaggatacgagcgtagaaatccagagaggcgttgatgtctttgacccgcagcatggtgtgattgaacacgaagtcccgggtttcgtccggcggttgtggcatggttttgagctgatgttggaagttttgggggtgcataggaggtattttgcgtaggaaaggccggtgtgtttacgggttgatgtgcaaggatggagtattgcccccccctttggggggcttcttttgaagttgttgatgtgatgctgctgtactggtgttcagcggagcaggatgagtgttgctaagccgagaaagcttaggaagccggtgacattggtcagggtagtgagaataacgcctcccgctaatgctgggtggaagcctaggcgtttgagtgtcattgggatgatgactctcccctcaatgctgcggtacataagttgatggtcagtgccgagccgatcaccagggacagcaggggttgtttgagccaaagcaagacgatgatgcccaagcttacattcagggagatgccgttgatgaaggcaacagcgatttcttttttgaggagtggtaatacgttgggggtgttgatctggccgagtgccaagctgtgcaccatcactgccaggacttgggtgcccgcattgcctccgatgctggcaacgattttggcgtcagcgctgtcagtgtcaccagttttcgatggtgtattcaaattcgctgacaacgttgacggtgatgaatgcagtgcataggttgatgcctaaccacagtagtgggctgaacatgttttctacattgctgagtcctgcggcgctcatggcttggtgttcggcttgttcacggatgatgtcgacgatgtcgtcgatagtgatatggccgagaagggcattgttttcgttgacgactggggctgagagcccgtcgtggtaagaaaattggcgtgcgacttcttgagcgtgttctttgatgttgatggctggttgttcgttgtcaattaagcgattaatcagtgtgtcgggttgatgggtgacgagtgtcgctagtgaaactctgccgaggtattggtggtggtggctcaccacgtacaggtggtcggtgtggtcgcggagttcggcacgcaggcgcaattggcctaggaccatgtcgacattgacatcggcgtgtaccgtgattgtgtctgggttcatcaggcgtccgacgctgtcctcaggataggagagggcttgttcaaggcgtttacggctttcgccgtccattgattgaaggagttggtcgataactgtgtttggcaggtcatcaactaagttggctaggtcgtcaatctctaggtcttcgactgcggcgatgatctcgtccatgtccattgttgcaagcaggctttctcgcacttcgtcaccaacgtgcaggagtactttgccatcgtcttcatgatcaaccaagctccatacagtctcgcgtttccctgtgggtagtgattcgaggaggttgccgatctccgctgtactgagtgtgttaatcaagcgtcgaatggggctaaacgacagctatctagggcgttggatagtaggcgcagttggtttcatgcttggtttccggtagaggaaaaatggaccgttcccgaagggtacggtgggattcaatcaatcttcattattgtctttcaataggatgatgagataagcgtccggtagcgatggcgacattatgtcggtgtcgtgttggcgtgtgccgccatccattcttcgatactcttccggtcgcgtgcgtggagcagtgtggttgcgcttgttttcaatgcgcccaggtcactgttgcggattgcacggcgtacttcaagtaatgtggctgggtgaaggctgaattctgtgaggcctaatgccagaagcatgggcacgtagtgtggatcgccagcgatttcaccgcagatggcgacaggggtggcatgtgtatgtgcggtgacgatgatctgagccagtactgccaggacgccagggtggagtggggagtatatttcgctgattgccgcattgttacggtcggcggccaataggtattggaccaggtcgttggtaccgatcgataggaagtcgatttctttgataaagctgttgagtgcgattgctgcagctggtacttcgatcatcgctcctaggggaacctgctcggcaatgtcgtggccttcggtgcgcaattggatgctgagcgctttgatctgcttgcgtagaaggatgatttcttctcggcagctaatcatggggaccaggatacggacatgcccataggtggaggtgcgcaggatcgctcgtaattgtgtgttggccactgcggggtgtgccatcgacaggcgtatcccacgcaggcccattgctgggttttcttcgttactgagagtcaggccggtacagtcggttttatctgcacccagatctaatgtgcggatggtgactgggcgtccgttcatacgtagtacagtgtcgcggtatgtttggaactgttcttcttcgtccggcagtttgttgcgttgcagaaacaggaattcagtgcggtacaggcccacaccggccgcgcccagtgcgtatgcttgggagacatcgtccggtgattctgcgttggcctgtacgacaatgtcgacgttgtcgcgagtgcggctgtgtttagagcgtagttgttccagctcacgttgttctttggcgcgttcgcgcagtcggctatggtagtgacgcaggtcctgtggcgatggattgacaatgatttctccgctgttgccatcgatgatcagcatgtcgccgttggtgatcttttgtagctgcaggtctcctgcaccaacgatcagtggcaggtgcaagctatgcgccaggatggcgctgtgtgagagtgtattgccagccgcgatgacgatgccaataatgccttgggcttgtacttgggccaattcggatggggcgatgttgttgcagatgaggatttcacctgcagcatctttgggttcgggggagtgtttttttaggaaggcgtggatgcgtccgagcacgtgattcaggtcgtccatgcgacttttcaggtagtggtcttccatggcttcgaattctgtggtgaggcggtcgcgctgtattttcagggcgtattcggcactgtagttgtgagtgaggatgagttcgttcgggctccgtagtagctccgggtcgtcgatcaacagtgtgtgtaggtcgagaaactcgccgacttcgtgggacaaggtgccatgcatgcgttctcgcagtacttgtatttcctgacgcgctgcgctcatggcttggtacaagctatgtaattcggcgttagtgtcagtgatgtatttatcctggatttccatgacgttcatctgacggacccaggcgcgccccagtgcagcacctcgtgctgcgccgtggccctggaggcgcacattcatctgtgtgtgtagtgtgggggtggggcgatgagcggagtggggcatgtttatctgtgctctttatgtgtcctcgttgaagcggttttcgaacagttcactcagtgcttgcattgccgtatgttcgtcttcaccgtcgatccgtacccggatcacggtgccttggctggcggcgagcagcatgactcccatgatgcttttggcgttgacttcgcggccttttgtcgacaatgtcgtgttgctttggaacttcgacattgtttgtaccagtttggccgtggctcgcgcgtggagtcctagtttgttagttactattagttcgtgttcaagcatcgtcaatgattgctccattccgggttgcggcggctgccgtggcaggcaggtcttgcaggttttgttctgggtgattcatcacacgtaatagcattggtaggctcagggctgagactcggcgcaccggggtgccgagttgggctaggcggtgtgcgaggttgctcgggctggcgccatacagatcggtcatgactaacactccttctccgttgttgacccgatgcatcgctgttgatgcgtgtggtagcaatgtatccagatcagcatcgagagggacttcaaatgcttcgattttgaggggtaattgttgtaataaggctgtagccacacgtaataaggcgtggccaatgccggggtgagtgattaggagaatgccacaggccataaggaaaagttaacagggcggtgttctctgagcataggtgtgtggtgtgtatgtgctgatctgtggggggaggtgctacgcccagaggcgcgtgccatgttatttggagtgtatatggtgtaggcagggtcgcacatgtttaggttggaaagcgggcggtgtttttttatgtattccctttttttgagatgtggtagcaatgatgagcgatggtagggagattgttggtacgtatgttgcaatgttttatcgacttttgggaatggttgagcatcattggtaatgccgttttgtgcctgcactctgagttataaagttcgctatgccatgatgcttgaagtatggatgctttttttctggatcattaaggttactcaagttcgcgatgaaaagtagctacttcagaccaccctttttcgcgtgcgtgtctggccatttgctcggctaggtagacggaacggtgtttgccgccagtacagccgaatgcgacggtgacatagcttctggtgtcggcctgtagtcgtgccagccaagtgtcgagaaattcggtgatttgtctcaggtagaggatcacgtctggttgttgttccatgtagtcgcgcacgttgctatcacgcccggtcagtgagcgcagctctggttcccaatgtgggttcggtaggatgcgtgcgtcgaatacgaagtctgcttcggttggtacgccgcgtttgtatgcgaatgattcaaataacagtgatagtttgtcgctgtgtgttagtgcgaattctgtgacgacgtgtcggcgtagttggtgtacgttgaatgtgctggtgtctatgactgcctcggcggcttcgcgcagtggtgcggtcaattcgcgttccagagcaatggcttctggtagcgatagccctaaatggctcagcggatggcggcggcgggtgtcggcgtatcgtttgagtaaagtttcgttgctggcctcgaagaacagcaggtgtgctttgatgttgtaatgcttggctgtgtggcgccattggtctagttcggagagattactgccgctgcgtatgtcaatgcctatggcgatgcgttgatcgctcagttcggcaacgcgaaggcgacagcgtaagaagtgcggtagcagttctaccgggagattgtctgagcagtaataatcaaggtcttcaaaggtctttagggcgacggatttgccagagccagagaggccgctgatgataatgaggctatgttctggcggtttcatgggggacgccgttctagcaggttgctgtgccgagcgataaacattgttgctgggtcgatgcctttggtacgcagaatgtgtaggcgtgtggctgcttccgtcaatactgcgagattgcgaccaggcatcactggcaaagtaattaatggaacatccaagtctagtacgtggcgtgtgcctgaatcccctgtgaggcgttcgtagccggaaggtgtgggttcggttattggcttggttaaatgtacgatcaggcgtagatatttgttcttctttattgcggtatcgccgaacatgtggcgtacgttcaatacgcctaggccgcgtacttctagtaagtcttggagtatttcagggcaggtgccgtcgagtacgtccggagcgatctgagtgaattctggggcatcgtcagcaacgagacgatgaccacgactgaggagttccagcgctagttcgctcttgcctgagccagcttccccggtgatgagtacgccaatggagtagatttccatgaataccccgtgtagcgtggcgcgtggcgccagtatgcgtgcgaggtggtaggaaagatggttgagaagctcgtggcctcgcttgggagagacccataaggggatctggctgttgtctgctgctgtccgcatgtcttccggacaggattgattcttgctgatgaccagggtgagcggttggaattggatgatcttctcaatggtttctttgcgtttgtttggttccagagaatccaaccaagtcagttcttcggtaccgaggatctgcactttgtttgggtagatggtattcaggtaaccggcgagtgagggacgtcgggcgcgggtatcaccggagtcaatctgacggtgttcgccctgttgtcccgcaatccagcgtagagagaggcgatcgcgttgtaagtcgaacagttcgcgggcggtgatgctggtattcattcagcgttttttgcgggcttggtatagaaagtagcagtttgggcatttcatctgctgcgttgaatagtaagtctactattgagtgaggccaacgcagcagcgttattacctgcttgtttcacggtcttatggtgcggctagttagggcgtggtttgcggtgttgcgttgctgttgtcagtacgctttttagctaaatcacgcggatactccgggtgagcaccattaccatcaaatcaatctggagtaggtaacttcaagttgcaatcattctaggtgatcgcgtacctccttggcgtggtggtcgcattttttttccttgtgcttgagtattaatcgatcaagtttgtctgctaccagatcaatggctgcgtacatggttgatgcactggcgttggcattcaaagtacggcctgggatattgattgtagcggtaacatgatggtcgattttactcatggacagttgggtgcggatttcgcagtggtggctgaagtggcgttggaggcgttttagcttcgtttccacatactcccgcaaagcaggagtgacttcgatctgttgcccataagtttcgatgtgcatcggatacctcccattggttattaagttaatcaatcatcctattcctgtttgatccacctgtttggcgctgagacgccggaaatagatggatcagaggactcggacgcgttcgtgggatgcggagatgttcatagcatcacgatactttgctatggtgcgtcgcgctactgggataccggatgtcttcagcaattcagctagtttggcgtcagagagtggcttgcgggggttttcagtttctatgagacgtctgatgattgcttgaatggcagagttggaggtctctccgccgctgtcggtgctgattcctgaagcgaaaaaggtgcgtagcggtaaggtgccacgtggggtgcgtacatacttgccagcaattgcacgggatacggtggattcatgcagggcaagttcggttgctaattcgcggatcgtcaatggacgtaacgcgtgttggccgaactccaagaatcccgtttggtgacgtatgaggctgtttaccacttttaacaaggtttcaccgcgtgcttccaggcccttgagcagccaccgtgcttcctggagttggttgcgtaggtagctcgcattggcgtcattgcagcggttgatgagctgttcgtagccgcggtggaggacgacctgtgggaatgcacgttccaacagcgcggcttgccacagcccatgttggcgccagatcacacagtccggtacaacgtaggttccaacttctaagtcgccaattttcttacctgggcgagggtccagtccacggatcaattccactgcctgttggacgtcttgggagggtcgtttcagttcgcgtgccagtccggtgacaccactgcgcggcaattgttcgagcagtgggctgttgacaatctgcagtgcaagtgcacgtccgggtatctcttctttcaatgatttcagttgcagtgtcaagcactcggccagcgagcgtgcagccacgccggtcgggtcaaaagattgaatgtgtcgtaatactggtagcagttcgctttcatctacggataacggggccagggttgcagtcagtgtggacaaaagttcacgcaggtaaccatcttcttctatggcatcaatcaagacggtgcctatttggtaatcacgtgctgacagtggggagaggtgcagttgccacagcaagtgatcagtgagagtgttcccggtggtcagacgttcagcagggttgttgtcgtcattttcgttgcttttactgccgttgatatcccaggcggattccttggcctgccaatcttctgtttctacttccctttcggtagcttcgctggtctccgatgattggttctcggcccagtccaagagtggattgctctctatcgcggcggtgatttccagttgcaattcggcgttggacatttgcagcagacggatgctttggtgtagctggggtgtcataaccagctgttgtccgatggatgttcgcagtcttgctttcaatgtcatatcgtttattcgtactgatcatcatcggcgttagatgtcgatcacaggtggaaagtctctccaaggtatacgcggcgcacatccggattagtaagcagtgcatctggcgttccctgtgcgaggacgccaccttcggcgaggatgtatgcgcggttgcagatccccaaggtttcacggacattgtgatcggtaatcagtacgccaataccccgttctttaagatgggtaatgatacgttggatctcaccgactgagatcggatccacacctgcgaacggttcgtctagcagcatcatgcgtggttgtgcggccagggcgcgggcgatctcgcaacggcgccgctccccgcccgacagactggcgccgagttggccggccacatgtgagatttggagttcgttgagtagcgaatctaattcgtgctgacgtgcttggttggtttttaagtcctgacgtagttctagaacaaggcggatgttgtcggtgacgctcagtttacgaaacacggagggttcttgcggaaggtagcccacgcccagctgcgcacgagcgtgcatcggtgcagcagtgatgtcgcgtccgtctaattcaatacgaccggcatcggtgtttaccaagccaacgatcatatagaaacaggtggttttaccagccccgttggggccgagtagacctacgatctcgccaggctggagggtcagtccgaactcgcggaccacctcacgatgcttatagcgcttacgcaggccgctggctacaagcattatattttctcctgcttggcggcaggcagggtgccttgtgagacacccttcggttggattgtggtgcgcacccgggtaccgtcgttaccactacgcatgtcaccggtttgggtgttgtaaatcatgcgttggccagtgttattgcctttaggtgactcgactttatagttccctgtgaggatgatgatgccctctttgaccttgtaatcgatattgtcggcttggccatgtagtgttgagccgttatccatatcctgcttgaggctggcttgtttgccgatcagtacgatacggtccatgtccccatttttgagaaagacatcggcagtgtcggcatgggcctcaaggctgccttgttggatcacgacattccctgagtagtgcgccttgccgtcgccaagcatgttaccttcttgagtagcagagtcgattgtcatcggttggttgcggtcgctgcttttagctgctgcagagagcggcgcgaacagtaacgggaacaagaaaaatttaacgagcggcgctcggttcataacgtgtgtttaccttggaattgagcttgtattgctgggtctttgtattgacttcgaacccaacgccggtctgaatgataccttgatgggtgatcgttactgcatctgtggtcttggccaagtgatggtttgggtagatgtcaaggctttgggtgcggaatgtggttggaacctgtcctaggtcagtggggctgtcgcctttgacgtcgtggcgaaggcgtagcagtgttccatctttgttgatccagcctgtttgtgcctgcaatgtccagtgttgcccagcttgatcggggatcataaaaagtggggcggtcacctccgcactgctgtcggtctgattgtgctgcatctgctgcccgagcagggtgagtgactctttgcccgtctgtgtgtccaaagcgaccagcttaaaatcctggagcgtgtagtcagctgcgatgtcccgtagcggtgtggcttgggtgtgtttgcgttgatgccacgctgaccagccgctgacaatcgcagcgagcaatagcatgatgttgagaatactgcgccaactcatggggtgaattttcgcaatagtgcgtcgactttgtcttgtgccgccaggagcacatcgcaaacttcccgggcagccccctcgcctcctcgggcgcgggtctgccaagcgaccctctctgcgatccacggatgtgcgttagccggggccactggtagaccgactgtgagcagggcaggtaaatcgactaggtcatcgcccatgaataacacggcgtccataccgattcctgattccattgccagtgtttgtaccgctaaacgtttgtcttgcacgccgatttttatcgggagtcctaggtcttcggcgcgctttttagcggctaagctggctagtgcggtgattagggtgacgcggatgccgcagtgttctaattgcttgagaccctgaccgtcgagcacatggaatgccttactttcatggccgacgtggtcgtagtacagacgaccgtcagtgagtgtgccatccacgtcaaagcaggctaagcggatgcattttgcacgttgaatgacatcggcaggcagggtatttaatggggaatagggcattggtatttttcagaggattaaacaattttggcgtgcagcaggtcgtgaatgttcagggcgcctaccgcacgctgttgcggatcgaccacaatcaaaccattgattttattggcttccatcaatcgtgcagcttcggccgcgagttggtcggcattgattgttttgggatggcgagtcatgacttcgttgatgcgcgcgtttcttacatcaatgttgctgtccagagcacggcgcaagtcgccgtcagtgaacactccctggagtcggccctcgttgtcaacgattgcagtcatgcccagacgtttacgagtcatctcgagtaatgcctcgcttagtgtggcttcctcatgtactgctggcaggtcattaccactgtgcatcacgtccgtaatgtgcagtaggaggcgtcggccgaggtggccagcggggtgtgagcgggcaaaatcttcagcagtaaagccgcgtacatccaatagtgcgactgcgagcgcgtcgccaatcacgagcgaagtggttgtgctggaggtgggtgctagatccagtgggcaggcttcggtggtgacactgacatccagatgcacatcggcagcctgtgccagtgttgattgggggcggccggtcatggcaatgattggattgccttgacgcttgaggactggaagcagcatccgtacttcgtctgattcacctgagtaggacaacgccaggatcacatcgctgtccgtgatcattccaaggtcgccatgcccagcttcgccgggatgcacgaagaatgcgggtgtacccgttgaagcgaaggtggcggcgatcttgcgtgcaatgtgtccggatttgcccatgccagtgctgatcacgcggccgtgcgagttcagaatcagccgacaggctgccacgaatggtgtgcctatccgttcgttgagtaatgtcagcgcctcacgctcaatctcgatcacccgtcttgcgctggcgatcagcgctgtatcgctgaggtgattgtgttggagtgatgagacagccatacatgtgttcagtacaggagtaaaatgaacctccattttattagatttagagacgtgtctattggacgctgaaactattcgtaaacttattgagtctggtttaccgcaggcccgtgctgatgtgcgtggtgaagatggtgttcattttgaggctacggtgatttgtgaggcttttcgtggtaagggaccgttggcccgtcaccgtatggtgtatgcgtccatcggtgatttgatggggagagcggtccacgcgttacagcttaaaacgttgactcctgatgaggagtgacagcctcgttattggtttgtgttattacttttttcctttcacctatccgttgatggtgctgattaattcatgtcaaaaatcgtagttgctggtggtaccccgctgtgtggggatgttcgaatttccggtgccaagaatgctgtccttcctattttatctgccacgttgctcgctgatgccccggtggagatcagcaacgtgccctatcttcatgacgtgatcaccatgatcaatttacttcgtgaattgggagcgggcgtcaccatgaatgaaggcattgaggcgaaaggacgttcgattacggtcgatccacgctgggtacgtcagcacatggtgccgtatgacttggtgaagaccatgcgtgcttctgtgttgctgttgggtccattattggcctgctacggtgccgctgaagttgcacttcctgggggatgtgcgattggttcacgtccggtcgaccagcacatcagaggattgcaatcacttggtgcggagatcacggttgagaatggctacatcaaggcttctgtcagtcaggggcgattgaagggcggtcgtttcgtgttcgacgtggtgagtgtgacaggcactgagaacttgttgatggctgcagctgtggctcaggggacgagcgtcattgagaatgctgcgatggagccggaggttgtcgatttagccgagtgtttgatcgctctcggtgcgcgtattgagggtgctggtaccccacgtatcgtggtcgaaggggtggaaaggttaaagggcgggcagtatgccgtgttacctgaccgcattgagacaggtacttttttggtggctacagcgatgactggggggcggatcagcatgcagcaggtgcgcccgcagactctggatgcggtgctgggcaaactgaccgaggccggagcgtgcatcgaaataggtgaagatagtatccgtttggatatgcaggggcggcgtccatgttctgttaacctgacaaccgcaccttaccctgggtttcccactgacatgcaggcccagtttatggcgcttaattgtgtggcagaaggtgtcggtgtgatcaaagaaacgatcttcgagaaccgtttcatgcacgttgatgaactgttacggctcggtgccaaaattcagattgagggccataccgcgattgtgcagggtgtcgagcgattgagcggtgcaccggtgatggcgaccgaccttcgcgcctcggcctcattgattctggctggtttggtcgcggagggggaaacaatcattgatcgcatttaccacctggaccgtggttacgaaaatattgaggggaaactcggagcgctgggtgcatcaatccggcgtatgacatgattttgcagggtcgcttcagtcggcggcggaagatcctgggtgctgtcatgttggtgttcctatgttggttgggttacacccgatacgttggtttagcgattgctgagggcgtgcagttcaaggatatggattggaatggtgatggaacggtgtcacgccaggagattgcgcaggcgttctacgcggtagcagtcaggcacagccaagagaaccagcgtcattgtgtgacctattattggcgccgcagtggggaacagatccgcgtagagtgccgtacttttctagaaaaatcgaattaaatcaaattgttatgtgaaatcggtttccgaaggtgctgttatcaatatcaatctaagtgattgaattatattttggttgatgaggtgcatacgaagatggttttgggggtcttgctaaggtattgggaaaggccctgttccagcctcgcatgccacccagcattcggaaaaaataagatgctgcatgaagcggagcgcgtgctatcaggtaatggtgcaacagcctgtaggctagcggcatcctgtaggtggaactcaaagtcccccgtgagcagcgcaaatcgcatcaatgatgtgagcacgagcactttcgccgcatggtgcagtgcgtcgccgtcgtcgattccttccagggcgtggatgcggtgctggcaagactcagaaaaacgctttgatgatcagtgcagcgatgccggtgacgataacgccaagcatccacttgagtagtcgcatttcgccttttacttcagcgaaccgttggtttatctgtgcgaaacgtagatctacctctgtgaagcctttctccatgttcgcttcaagacgcgctaacgccttaccgtttctggattctgactcggcaaaaccttgtagatttgttttcagcacctcttctaacgcttctgcttcggcctcagcgtgtgcaggtggaatgccagcagttttaagcttatttgcaaatttgagtgtatcgaacgagacagatgtcacgaattctcctgtcttatcgacatgtgatcgcgagtgtgtagcagtgttgtctactgtagatgacaaggtgatgtgagtgtgtgatatgaagctccgccgctatcaaccggtctgtattcgttcatcacatcatggctgctgatacggtggagggatgagg

SEQ ID NO: 1 - DNA, 2731748 bp, Xylella fastidiosa (residues 1,365,875-2,731,748 of 2,731,748)
gatagcccgccgtgaatcaaaacgagaaattcaaggaaaaaagaggataagcatgcgcgaaccatgcgttcctacatcacaaggagaaatgatgtcatgaatgacacctttgactacatatttggctatgcgctaagcaccgcccttgcgcggtattgggttaacccagacggaagccaaggcggcattgtttctattgatgccaagatagatgcttccgtcatgatcggcaaagacgccgtggtatttcctgatgcaaacattgctgaaagagcttgtattgcggaaaaagtctgcatcggcaatgcggtacgcattggtaagcaggcgatgattgatcatggtgccagcatcggtgacaggtcgaacatcggtgaaagatctaggatttatcaagattccttcatcggcgaaaatgctgtcattgccgcaagagcttgtatcggtgaaaaagtctacattggaaattttgtaagccttgctaaggattccatcattgatgatggtgtcaacatcggtgaaaggtcgagcattggtgaaagaactaggattcgtcaagggtcgttcatccgtaaaggttgtgtcatccgccaacggtctgtgattgccaaacgcgcctatattgatgaagaagtctatatcggcaacgcggtacgcattggtgaagaatcaatgatccatcgtagaagccatatcggatctggtgcgcgtattggcgggtcagtatgcattggtgtgtactgtcgcattgatgggtcagtacgcattggtcagcaggctgacattggcaaatgggtcagcattgatgagcatgcccgcatcggcaattttgcccgcattggtgagggatccaaaattggtgggcgcgccaacattgcagctcacgtcgtcctagaaaagcaatccatcattcatagtgaaacttgcatccaggatgctgcaaaagctagcgttgatatgtccaaggatacggggatatgaaatgcatgtggaagatcgttttttatccgtggatagcgatgtagcacccaagtacgtgagacgtgagatggctatgagcgaaacagaatttctgaccgctgaggagttggttgaaatcacaggctataagaacttcgttggtcagcgtaaatggctggacaaagaaggatgatgctatgtggtcaacgccagccgacgcccgattgtgggccgctggtttgcacgcttgcgcttggccggggtgtctccccacatggcaactactgatatgcgcccactacaacagcctaaacagtctcgttatgctacagagcctgattttgctgcgctacgtgagctaacagaaaaaagaaaaagagctttatgatgcgactaaaatcaagccaccgtgatgtaccacccaagaggctacgtcgcacttgtgtgctgaaaagcggcaaagcgtgagaatcgttttattacaacgattacaacgggcgtactgctgaaggacgccgcatcggcattccgctgcgatgcgatttgaaccaggcaaagcgcaagtggccgagtgggagtgttgtcaggctcccattgaatgatcgcattgctttaagaacatggattgttttcttggtgtatttgcttttttgctgatcgcgtgcagtttgtaaaacgagggtgattgtcagcgccttggccgtggcgtgataccgccgtatctgcattcagcccacccaggctcttgcattgcggaagagtcgtaaccaaggtgtgtcttctccccactcattcggggaccagctcaggttgatagtgcgtggagtacgttccgggtgcggcataaggatggtgatgcggccatcagtggttgtcagtccggtgatgccgttgggtgagccgttggggttgagtggatagtgtgtcgctgcttgcccatgtccattgatatagcgaagcgcgacgtgtgcagcggcttgatctgcaggggtgtcgaacatggcatagccttcgccgtgggccaccgctacggggagccgtgagccggccataccgctcaagaaaatagaaggggattggatgacttctagcagtgcggtacgggcttcgaattgctcgctgcgattgcgtacgaaacgcggccagtgttcggcaccagggatcattgatttgagttggcttagcatctggcagccgttgcacaccccaagtgcgaaacgatcggtgcgtgtgaaaaatgcggcgaactggtcgcgtaacgcggtacgttccagaattgaggtggcccagccgcggccggcgccaagtacgtcgccgtagctgaagccaccgcaggcggctaagccgacgaactcatccagatggacacggccggtaatcagatcgttcatatggatgtcgacacaatgaaaaccggcgcgctcaaagcacagcgccatctcaatgtggccattgatcccttgttcgcgaagaatagccactgtgggccggatgccggtcgcgatgaacggcatggccacatctacggctgggtcgaaactcaaggttggtttcagtcctggtgcggtgaacgtccgtgcaatttcacgctcttcgtcggcacactctggattgtcgcgcaggcgttgcattgcatgtgtgactgaccaccaggcgtcaaataatgtctcccaagtccattgggcgagacattgatcgttgtgcattattcggatagacggcgctgttgtggggtgtgcgatgcgctgtgtgtaagccgtcaagccatgctgttccaccagatcggtgaaagcggtgcggtgctcgtcggccacttgtacgatggcgcccagttcttcgttgaacaggtgagggaagagatgttcggtacggttgtcgcatgtaatgtctaggcccagatgtgaagcaaatgccatttcacacaatgcggcgaatgcgccaccatcgctgcggtcgtgataggccagcagcaggcctgcgttgcgcgcatcgttcatcagtgcgaagaacgcgcgcagtgtctctggtgtatccagatccggacattccccaccgaaggtggggagtgctgcgctgtcagcatgtacctgcgccagcaccgagccgccgagccgctgtttgccaccatccagagcaatcaaccaaagttcgctattggtctggtgatgtagcagcggggttaattgcctgcgtgcgtcagccacgggcgtaaacgcggagatcaccagtgacactggagagatgcaggtgtgtgtggcgccgtcggcttgccatcggctctgcatcgatagcgagtctttgcccacggggatgctgatgtccagtgccgggcacagttctattcctattgctttgacggcgtcgtatagcagagcgtcttcaccggggtgctctgcggctgccatccagttcgccgagagtttcaccatgctcagtgactctactggagcggcgcataggttggtgatggcttctccgaccgccatacgtgcggcggcggcggagttcaatagggctagcggagcgcgttccccaatggcgaaggcttcgccggcataggtgccaaagccggcaagggtgatcgcgcagtcagcgagtggcagttgccatgggccaatcatctgttcacgtgcggtgagaccaccgatgctgcggtcaccgatggtcaccaggaagttcttggccgccacagtggggtgggcgaggacacgtaaccctgcgtggtgcagatccagttgggtactgtctagtgttggccagtgtggcggtggcgggtgtgccgtgttgcggtgcatcttcggcgctttgccgaacagcacatccattggtaaatcgattgcaaacgcttccctgacggagggggggagggtgttgggtgtcggggaagtttcagtgtgatttgctctctgtggggtctgttgttctgtaacgtggagcgctgcggggagggtgactccatagcccacaatcaattgttctgttgcagtggctacgccgaccgcggcgaacgggcaacgttcacgggtgcagatggctgcgaatgcttgcagatgtgccgcggagatgccgagtacgtagcgctcttgagattcgttgcaccacagttccaaaggggagagggatgggtcatcgctcggtatcttggccaggtcgatgacgccgcctacttccgagtcgtgtagcagttcgggaatcgcgttggataaaccaccagcaccgacgtcgtgaaatgagcggattgggttgtttgtacccagtgccacacagtgatcaatgacttcttggcagcgtctctgcatctccgggttatcacgttggacgcttgcaaaatctagtgcttctgtgctcgttccggaagtgacggagcttgcggcaccgccacccagtccgatgagcatcgctgggccacccaacacgatgatcacatcgccaggctgtagccggagtttcttgatgtgtatgcggtcgatcgcccccaagccgccggccagcatgatgggtttgtcataggcgcgggtgagtgttttgcttgcggaaagctcaaagctgcggaagtagcccaggaggttgggcctgccaaattcgttgttgaatgcggcactgccgagtgggccttctagcatgatgtccagtgctgaggccatgcgtgggttgagtgcacgtggcgtttcccacgggtggggaagtgttggaatgcgtaggtgggagacggagaaaccacttaatccggctttcggtttaccgccgcgaccagtggccccttcatcgcggatctcgcctccggcacctgtggaggcaccagggaagggtgcaatcgcggttgggtggttgtgcgtttctaccttgatttggaacgcgccaggcaggaccgcttcatggcggtattcgccggtgatggggtctgggcggtaacgtgctgttggatgaccctcaatgacggcggcgttatcggcataggcgctgagtgtgtattgcggggtgtgttggtgggtgtgtttgatcatctgaaacaaggagtgctgctgctctttgtcgttgatggtccaagtggcattgaatattttgtgtcggcagtgctcagagttggcctgtgcgaacatcatcaattcgacatcggatgggacacggtttagttcggtataacgggtgcgcaggtagtcgatttcgtcggcagtcaatgccagtccccatcgcgtgttggcgtgttctaaatcaattaacgcaatgcgttccagtgacagtggttcgggcacgttaaacaaggttttgacttcgtcctctgactccaggagtgattgagtcattggatcgtagagttgtttggcgatggccgggcatgtcgcagcgttggctgaccagcctaggaggtcgatacgggtaccgcgttcgatgcgtgcaatgggttggccggcaccatggagcagttccgtggttttgcttgaccatggggagtgtgttcccaggcgcggcatgacgtagcgtgataccacgtgttcctggggtggttcagagactgattcggcttgaaggatgcggtgcagggccgacatatcgagggtatggccggatttgatttgaatcaggtagcaatgccatgcgccgacaatgtgcagttcaggcacagtggtttgcaggcgggattcaaatcgggcaagccgaaatggtgacagagcggatgcacccttgaggacgatcatgtccgaggaaccatagtgaggaggcaggccgaccattgtacccgcacgtatgcggggtgttggtgttggtaggagcggttagcggggtgttactggacagtgcttcggctcgcatgaggtggtagcaacatgggagccgaagtgatggggagtgcggcagaggggagcgggaggcttgccgttctggtagagggtctcagccccctttagctgttgcggcggcgagtttgtccaacagtgcacgtagtttttctggtggtagatagccgccaagctgggtgccgtctggggcgaagattgctggggtgccgttgacaccgatacgttgacctaggctgtattccaaggcaacagggttattacaatttttattctggatttgtttgccggcttttgcttcggtcagtacttgtttacgatcagcggcgcaccacaccgagaccatgtctttgtaatcttggcttcctaaacccatccgtgggaaggcgaggtattcaacggcgatgccttgtttattcagttcggcgatttcgctatgtagtttccggcaatagccgcattcaatgtcggtgaatacgctgatggtgtattgggggttctttggtgcgaacacgatgcgttgcgattggggcaccgtggccagttgggtgcggcggtaggaaagcagcccttcgctgacagcaaattttttgttttgaatgtcgtagggttgtgcctgaatgaggtagcggccgttgtcgctgacatacagaatttggccgctgaccacaacttcacggaaacccgggaatggtgcggcaccgatgtagtctggcttgaaatctgggtccagagtgttgagggcggcagtcacgcgttgctgcacgttggctggcgtggcgttggttggtgtggtgctcgttttgttggagctgggttgtgagggttgtgcgcaggcggtgagggtcacgatacctagcaacaaggcgacgataaggcggtacattcaaacatccaaatggaacaatgagttgcaattgtctcacaggctggatgctgcatcatgatgtctatggtgtggtcggacaggtctgtattcattgttctcgggtgcgttgtcattaccgtatgtgcttttcaagcacgggggtggtgttgggcgtgcaattgttgtaagtgctggcgtgcgatgaatgtgtagatctgtgtcgtcgaaatggagcgatggcccagcaacatttgcaatgcacgcaggtctgcgccgtggttcagtaaatgtgttgcaaagctgtgacgcaggacatgggggctgactttgtttggggcgatgccggccaaggcggcatagtgtttgatccatctccaaaattgttggcggctgagacgtttcagggttgtgttgatgaacaaggggacgtctccgtcagagtcggcgggaatgggtttgtcggccgccagggatggccgtgcctgttctaaatagcgttgtagccagtgttgggattcttcgccgagtgggacgagtcgttctttaccccctttgccgatgatgcgtaggacgccttgacgtcggttcagcattgccacggggagggtgactaattcactgacgcgcaggccggcggcatacatcaactccagcatggctcggttacgtagtccttctggggtctctattgatggtgcggctaagagtgcttctatctgactttcggtgagtgctttcggtaatggatgaggtaagacggggtgggccagcagggtgcttgggttgtcgttgcgccagccgcattcgacggcataggaaaagaaggtacgcagtacggacagtaagcgtgcattgctcagtggggaatagtgttgttgggtgcgccaggtgaggtaatcgagcagggcaggtggcgttaaggtcgccagaggtccggcgcggccattgttccagcgggccaggccttccaggtcgcgtcggtagctgttgagggtgtgctgtgatagtccgtgtttgatccagagtgcatcaaggaagtgtgcaatggttgttgcatcttcgggtaataggggaggttgctgtctggccagttggcggcgttggttggtggtgcggggggtcatccgtgcagggtggcggggcggtacattgctttagtctattgatttgagttggttttgcacatcggcggtgttgtttgcaggatccacccgtcatgaggttggagggtcatgatttagaggtgcattgtgttttgaatccggattagggcgttgttggttgtggatgagcaaatagcagtgagatgggtgaatgggtgatggttgggtgaatagggggggtgacggtgtcatggtgctgtatttgatggggaaatgattactgctgtgtagctggattaggttcatgcagggtttccggcagtattccgccgcagttgcggcaatagcgtgcgtcgtggtcatgtccttggaggccgcaatgtgggcaggttcgcatgtcgtgacggtgttcttcttcgctgcggagtaggccttgggtcagttcggcggtgtagatgccggtaggaacggcgatgatgctgtatccaatcaggatgagtgctgaggtgacaaagcggcccagtgtgctttgaggtgtaatgtcaccgaatccgacggtggtcatggtcacgatggcccagtacatgccggtgggaatgctggtgaagccgtgttgggggccttcgatgacatacatggtggcaccggcaatcatggcgatggtcatgacggtgcagatgaatagcatgactttgcgtcggctgcgccatagggcctgcactagttcgccgctttcttcgacatagtgggtcattttaaggatgcggaatagtcgcaggagtcgcaggacgcggacgatcagcaggctctgtgtgccgggcatgaagagggataggtaggtgggtaggatcgataggaggtcgatgattccccaaatactcagtacgtaacgtaggcgctgttgcaccactaccaagcggatcaggtagtcggcggtgaatatgagggtaaagagccattccagggcgtacaggaagtctttccagtgtgcttggagggctagaacgctgtcgagcatgaccacaaggacgctgcccaagatcgctaacatcagtagcagatcaaagttccgtgatgggggtgtgtcgtgacggtagacgatctcgaaccagtggcggcgccaaccgctgttggtgattggcgtcatttgtgagtcgaaaagtaggggcatgtcgtgatcgtgtcttattgattgaaatacacgagaatgtagcgttcatattatcgataagacgtcaatgagcgctgtgtctgagtctgtgttatcgctgtctcgctattatttgccggtctatcgtccatgccaggtggtgttggtgcgtggtcaaggcagccgtgtatgggatgagcaggggcgcgattatcttgatctggctgcggggattgcggtgtgttgtttggggcattgtgatccggatttggtcgctgctttggtggagcaggcaggtcgtctgtggcataccagcaatgtgttttatagcgagccgtcgttgcgcttggcgcaggagttggtggatgtttcacggttcgctgagcgggtgtttctttgcagttccgggactgaagccaacgaggcggcaatcaagttggtgcgtaagtgggctgctgcgcaggggcgtttaccggagcatcgtacgattgtgacgttccatggtagtttccacgggcgtactttggctgcagtgacggcgacggcgcagcctaaatatcaggagggctatgagccgttgcctggggggttccgctatgtcgatttcaatcatattgaggcgttggaagcggcgatggtcggtggtgatgtcgctgcggtgatgttggagccgattcaaggagagggtggggtgatgccggtggtgtcaggatatttggcacaggtacgtgcgttgtgcgatcgctatggggcgctgttggtattggatgagattcagtgtggcatggggcgtactgggacgttgttcgcctattggcaagaagaggtggtgccggacattgtgacgttggccaaggggcttggtggggggttcccaattggtgcgatgttggctggtccgaaggttgctgaggtgatgcagttcggggcgcatgggacgacgtttggcggtaatcctatggctgctgctgtggcgcgggtggcgttgcgtaagttggcttcggttgagatcgcggccaatgtgcagcgtcagtcggtcgcgctacgcgctgggttggaagagatcagcgaggcattcggtggggtgtttacgcaggtgcgcggtcgcggtctgatgctgggcgcggtgttggcgccgctgtatgcagggcaagccagtgcgattcttgaggtggcggttgagcatggtgtgttgttgttacaggctggccctgacgtgctgcgttttgtgccggcgctgaatgtgagtgatgaggagcttgccgatggtttggtccggttacgtgcggcgttgggggattatgtgtcgcgtttcggtggttaatatgccaagtgtttgtaggggctgttgggtcgttgagttgtcgtggttgatgggtgtgttgatcgggattgagatgcgctgagatgtgggaagcggtgggtgatggggtgcaggaacaggtgggaaggtgaattggatgtgtgcattaggggtgtggtgttgtgtttgtgggtcagtaaggaggtaggtagtgtgtgggagtgtctttatgtgtttcagtaggcgtattcgttgaagatcggattgatgtcgtggttccaggtgtcgtcatagcgttgtagtgtgcgttgtgcggctgtctgacctgtgtgggcgatctcatcaaggacattgagaaagatggtttcgtcttgaccgttggcgttgtgctgtgcgcggcgacgtaagccggcgcgtgagatgtccagggtttgaagtgccagtgtgcgcacggtgctgttgcggaatggtagtgccaaggcatgtcggggtacgccgttgcgcagggcgtggcgttcttgcagagtcaaatctttaatcaggtcccaggcggcatccagtgcggtgttgtcgtacagcaggcccacccagaaggcggggagtgcgcacagtgttggtagtgggccggaatcggcgccacgcatctctatgtatttctttaggcgtacttccgggaacgcggttgtcatgtgatcggaccaatcccggagagtcggtaagacgccaggaagggctggtaggcggccctgcaggaagtcgcgaaagctctgcccgctggcgtcatggtagatgccagtgcggtaagagaagtacatcgggacgtcaagtaagtagtcgacgtagcgttcatagccgaagccatcctcaaacacgaagtcaagcatgccggtgcggtctgggtcggtgtccgtccaaatgtgtgagcggtagctcaagtaaccgttgggtttgccttcggtgaatggggagtttgcaaacagtgccgtggcgatcggttgcagtgctagcgaaacccggaattttttcaccatgtctgtttcgctagcgtagtcgaggttgacttgtacggtgcaagtacgggtcatcatgtccaggcccagttggccaactttgggcatgtaggcacgcatgattgcgtagcggcctttgggcatccacggcatttgcgcacgtgtgcacttggggtggaaacccatgcctaggaatccgagttgcagggtgttggcaatctcgttgacttcgcgtaggtgtgtttcagtttcgatgtgggtttgatggatggtttctaacggggcaccggcgagttcaagttgaccggccggttcgagggtgatggaggtatcgccgcgtagcagggcgatggtacggccatgttcttgtaccggtgtccagccaaagcgggtcatgccggtcagcaaggcctcaataccgcgttcatcatcgaatgttggtgggtgcaggtcgtccaaacggaagccgaatttctcgtgttcggtgccaatgcgccactgggaggccggtttttcgccggatgccaggacttcgacgagttgcgcgcggttagtgattggggtctcggtaatgtgactcggactcgacaagggtaaggctcacagggaatgtagatggggcgatgcgaggatggttccttaagcaccgcagggcggcactataaccgcagtatgtctctggaaggattgattccggtgatctttgcgctttctataggggtgtcgcatgggtgtttatctgtgtgtgagcatggtgccgatttcagggagtgactcagtagccaatggatgagtaaattgttttgttgttactttattttatataaatcaaagggttgtgatgggtttgcgtgcttgtttagattcaggcgagtcttgctaagcctaaccaggtttcgatcactgtatgcaattgctccacaccttggcgcgatttgctggagaaggtttgtatgttgatatggtcagcgaagtgtttggtgagttcattgcgcactttttgtagtgtttgtgcctgttggcctctgccgagtttgtcagctttagtcagtagtgcctgtgcgggcaggccgcgttgtctggcgtaggcgagcatttgtaggtcgtattctttgagtgggtggcgaatgtccatcaccaccaccagtccacggagggcttggcgctgatggaagtagctgtcaataaatgtttgccagtgtatttgcagttctttggggactttggcgtagccgtagccggggaggtcaaccaggtagcgttgcggtgtcactgtgaagtagaccagttgctgggtgcggcctggagttttggagacgcgggcgagtgcgttttgacgggttagggtgttcagtacgctggactttccagcgttagaacgtccggcaaaggcaacttcgcttccgtcatcggccggtagttgatgggtggtgtgggctgagaggaggtatttggcacattcgagtggtgatgacatctgtttaggatcgcatgtttgcgggggctgtgcgtttggtggcatgacgacagtttcaatgaatggtctgagggtcaaaaaaacaagaagttttgatcattcgttgctgtgatctgtgcttgctttttctgggatgaagatctgtcggcagttgtacggtggcggtgattggtgattggcattttcgcttgcatgatttgccacagttgggctctgtcctcagagtcttgatgactgtgttgctgatgttgttgcaatttcaatctattcttacattgatgggtgaacatgtaactttcatttttataaatcaattacttatttattaatttcactccgcaataagtaaagttactaatgattattttcatggagtttttgatgtggtttgcggattgcggagcgtaaattggggttctgtgtgaatcattttttaaagcgctgtcaaggatggtgttttgatccgcattgagagtaaagataaaaatgcatacgccattattgaagagagtgacggcaacacctggaattttgaaattactcagaggaattagctaaagagttggcttgctgcttgttcgggaagcctgtgatgacacctttaattgaagtggtttacagaatccgcaatcttccatcagatactggaagcaaggcattgagggtaattaagggaattatttttatttactgctaataatcccattagagataaacactaggaatcgcccctcctgtgtcctgtgtggagggacgagccaaatgagccacattcttaccaatgattcatccctataaaactattgatcgtgttgtgcccgatcccaagcaccgtgagcagccgcttcccaataggtgaaagttgctgctccaactctatcaacataaccttcaacattgcctgtttgatatgtaccatcgggcagattctgtaatgcagggccaccagaagccccttcgctgaaattacggcaatagggcaacgaacgcaccctcgggccgcccccatggggatcaggataaaatactgctcgttctgagcatttcaccagatgctcaccttcatcaatggcatttggatagccatagagtgagaagattccctgtgtaggtggagcagcaaacctgatcggggtttgtatgacaagatcacctggtctggaaccgtagttattgtgtgccacgcttagaaaagcaaagtcaaaaccatctatgccttgctgtgaccatccgttcacggtgtatatgtttctcacagggaatcgcccatcccagcgtccgtgattgtaattaagcaagaaaacaagatggtcaatacgttcatgaggttcatttgcaggtgattggacacaatgacctgcagtagcaacaacactttttgtggctgcctgtacaacattggcagtacaggacgaatcttcaccattcactcgaaaaaatagtagtcctgccgtcaatatctcagtagccgctggcgtactgatgtgtttagattcggaaatatctcctggatcatcgttgatcatttttatagcctgtgcctgcatcgcctgtgtcgccgccatgcgttcaggcgtccaatattcaagtgcagcgttttgctcctcttgggaaatagattgcaccaccacctcgttatcacttggtttcgcttgggctcccagagataacaacacaagcaaggtaaaaacaactgtattaccaaaataaaaccgatttttctgaaactgactcataaaccctccagagatcaatggaaataacagaggccgataaatcgttagccaagcaattattctcatcattgaactaggattttttcgtttcgaatcacacatcaaataaaatacgaaaaaatcttaaaaatcttgagatgtcagactcaaatttaagctttaagttgtgtgccgtatttaccagtcttgtcttgcaaatcacagttctgtaagaacatgactgagatactttctctagaggcggcctgacaggctatggcttcctttggttgtattaggtttagtggtgaggtgccggcaaaggcgctgctcctgcgcaccgcgagttgagcggccatcatggcccgcgtccgggatggttaatatgctagatggcaccaggtaggaaatattagggaaggcatgtattaaggtgatagcgatggtactgctgttgtcaatatctcagcggccgattcccgaatgcgaattgatgcatatgccgtactcgtcaactactattgctaactatttcttacgaagggcttcccaagaaggtcgtgcgttaacacctatgtaggtgtttaagcttgtctacattgctcatgcttggcaccttggattccgaaagcaacctttgattgatgaacatgtattgaattttttgggttgggaacgtcacgtcgttggactgctgttattattacgcgttcgtttctatagctatctataagctatagccaagcatttaatttctgcttagttccataagggcctgtattccggagtgtctatgtctctgtttggacgtttattgtctttattgcttgcttttgtgcctctgagtatttgtgctgctgtgaatcaccttccggttgttggtgaggattatgtcgagattcccgatggtcggccgtttgcgccgctggctggaaagattgaggtggtcgaaattttcggttatacctgtccgcattgcgcacattttgattccaagttgcaggcatggggtgcgcgtcaggcgaaggacgtgcgttttactttggtgcctgccgtgttcggcggtgtttgggatcctttcgcgcgtgcttatttagccgctgacgttctgggtgtcgcgaagcgtagccatacggcaatgttcgaggccatccatgagaagggcagtgtgccaattcagaacgtggggccagatgaactggctgtcttctacgccggatatggggtgcagccggatcgttttgtcgctactttcaatgggccggaagttgagaagcgtttccaggctgcgcgtgcctatgcgttgaaggtgcgtcctgttgggacaccgacgattgtagtgaatggccgttacatggtaactggtcacgatttcgaggatacgttgcgcattaccgattatctggtgagtcgtgaacgtgctgcctcacatggccggtgagccatagatgaggcagggtatgtggctcgtgtcatgatcaccggcatgctggctgtggtcggctccgcttcactttcactttcactttcactttcggagagaaagctatgaaaaatcgcttcgctatgatgttgatggcgttgttgcccgttttggtggcttgccaagctaaggatggtagtgcggataccgtgcagtatgccattccagcgcctagcgcgccgcccagcccctccacggcaacgaccactccgaccacaccgccgcccgaggcggcgcggccagttgaagcgtcgcgcgtgccatctgggccaaaaccagtggctggtacggattatgttgtgatccaggacggccaacagtttcagcctgtggttggcaagattgaggttgttgaggtgttcggctacgtctgcccggcatgtttccagttccaaccacaaattggtccatggaaggcaggtctagcttcggatgtgcattttgtttatgtcccggcagtgtttggtggtccttgggatgattatgcgcgtgcgttttacgctgctgagactctgaatttgcaggagaagacccatcagcagttgtataaagcgatccatgttgataagacattgaagggggagcgcggtcgcgacacggtccaggacatcgctaatttctatgctaagtttggcgtcaacccggagcagtttgtgaatacgatgtccagcttcggtatctcggcaaaagtaaatcgtgccaagcagttcgctaagcatagtcaggtcacggggacgccttcgttgattatcaacggaaaatacttggttaagggccgtacttacgatgatatgctccgaattgctgatcacctgatcgaaggcgagcgtaagtcgcttggtaagtagggttcgtttggttaagtgaacgattctgatcaacgcatattgcgggtgttgactgccaacattcaggccgcttcgagtactcgccgctatagcgactacgtgacccgaagctggtcgtatgcgttaccgatcggtcgcaagcgcattaatctggatgcaattgcacagttggccggtgagcgtgacatcgtaggattgcaagagagtgatcctggcagtttgcgttcgggcttcaccaatcagacgtgctacttggcgcagcgcgccggttttcattactggagtcatcaacctaatcggcgtatggctggggtcgcttccagcgctaacggcctactcagtcggttgaaaccgcgacagataaataatcatgccttacctggccggattcgtggccgtggtgtgctattggctaagttcggcaatggatttgatagtttagtggtagcggtggctcacctgtctttgggggtgcgctcgcgtatggcgcagttggttttcatcgctgatttgctggctgaatatcccaatacaatcctgatgggggatttcaattgcagggctgattgttctgagatgcaggtgttgtatcgccgtactcggttgcaaccaccaggtgtggtgatcccaacgtttccgagttggcgtccagagcgtgcaatcgatcatattttggtgagtgaaggcttacatatttgcaagacggaagcggttccggctgcgttttccgatcatttggcggtgagtatggatctcgttatccctcaacgcattttgcgttaattgtgttgcgcttggtccgttttgagatgtcatacaggttgtttgattgtgccaaggtatttccttgccatgagtcaacgtcaggaagttgttgcgcatccattttgttcagcgcagtgcacgttctgtagcggctgccatagctcgtttggcaagcatgaaatccaataagttaccgttgagttggcgccacagcactgctgagcggagtgcggccaatagcatggcgcgaatctctgctacgactccggcttgaccaaggtagtggggattgccttgtacgatgattctggggcgcagatgactgattgtgttggcgtataaggcaccgagtgtggagagtacttctgggtgggcgctgtcgccagtttgttcgacttgatgcgccgcttgggtaattccggctgaaactgcggcgacgatagaggtgtcgcgtatgaagcggcgttccaattgcaataccgccagtgctaggcgtggaagtaattggtcgcgtaattgattaccgaagtagtcatgcagtagctgcagcccttgagtgagatcacgtatcctgccgtagactgcttctggtgattcggcgtcaatacgcaatacgctgttgatggctgtacgtactgccgaggtttcggattgtccagtttctgcgatttgccgtacttgttgcagtgcttgtacgacgccagctaatgccagtacccggttgtctatcagagcattcattgcagcacattctcagttttggaaagattacgcgcccgcttgcgttctaacggtgcgtctgtggtggcgatcactgcgccacctaggcattcattgccgtcgtacagtaccagtgactgtcccggagtgactgcccattgtgtttgtgtgaaatctacgtcaaggctgccgtcgttgcgtactgtgactttgcaaggttcatcagcttggcggtagcgtgtttgtgcggtgcaggtaaaggtgggggctggcggtgatccggacacccagtgtgccggttccgagcgcagccagcgtgactgtaagaaggggctgtcacgatgttggtccacgtaaagtacgttggttgctaagtctttcccgatgacgtaccagggggaaggggggcggttgcgcactccaccgatattcaagccctgacgttgtccgagagtgaaatagaacacgccggggtgctcggcaatccgctgttcttgtggatcacggatttctcccggttgtgctggcaggtattgcttgaggaactcacggaagttgcgttctccgatgaagcagatcccagttgagtcttttttggcatgggtagggaggcctgcctggtgtgccagttggcgtagctgtggtttttccaagtcaccgattgggaacattgtcgctgctagttgttcctgaccaagttggtgcaggaaataactttggtctttgctgcggtcggcgcctcttaacaggtgccaacgttggcgataatgtttgatcctggcgtagtgaccggtggcaatgctgtcggcgccaagttcgcgtgctgtttccaggaaatgcttgaatttgatttcgcggttgcaaaggacgtcgggattaggggtgcgcccattggcgtattcggcaaggaagtgtgtgaacacttcctgccagtactcgtgtgagaaatcacggaagtgaaaagcgataccaaggatgccgcaaacggcgacggcgtcgcggcgatcttcttcggcgtggcactgaccatttccgtcgtcagtccagtttcgcatgaataatccggcgatggtttcgcgttgactgttcaagcgccacgctgcgaccgatgaatctactccgccggacatggcgacgatgatccggggtgtgttcatggtacgtatcgcaccaagtccagtggggcctgctgtccggacagatagtcggtgatgacttgccatactagcggactgcgtagggggggggtagccgtttgcagctctgatggggtcaaccagagtgcacgtacgatgccgacatccaggggatactggggatagtaggtcaatggttctgcagagaaggcaaatctgaggtaggtgtaacctgttgcagaggtccacaggtaactgccgattaggctcgttaaacgtactttccagccggtttcttccagggtctcgcgcagtgcggcctggagtagactctcgcctggttccaaatggccagcaggttgattcagcatcagtattccatcgattgtttcttcgaccagtaacaggtgctggttgtgtgctaccacagtggctacggttacatttggttgccagtgttcttgtgctagaggcatctttgtatgatcaatccagatagagagccgtctgtgaagtacactggatgagttggtaacctacccatcgttaaaatggttgatgttagagcgtctgaatgaggggaagagttgtgaatcgtagcttgttgatcgtccaatccgatatgttctccgccgtataatttttcagaatgtcacaaaagaccgtacacgatcaggataatgcattactgttggagactggcaataccaaagttgcgccgccgccgcggtatcaggtgttgctcctgaatgacgattacactccaatggattttgttattgtggtgttgcagcaattctttgctatggatcttaagaaggcaactcaggtgatgttgcatgtacatactcgcggttgtggtgtgtgtgggttctatacgcgtgaggtggctgaatcgaaggttgcgcaggttaacgaattttctcggatacatcagcatccgctgttatgtacgatgaaacaggcataaacccttacattccaattttactggggctgtatagtcggccctaacggtgtctgaatgctttgatttagcagggctgtggaaaatccccgctcatgcctcatattgtgtgtaacagttgttggagtcactcatatgttcagcaaagatctcgagcaaacaataggtcagtgctacaagcgaacgcgtgaggcgtgtcatgagttcatgaccgttgagcatctgcttctttcattgttggataatccattggcgcacgctgtgctaaaggcttgcggagcggatgttgccaggctgaagcgtgaccttgagcaggccattgaggtatctattacccgcttggatgccgatgacggccgtgatactcagccgacgcttggtttccagcgagtgctgcagcgtgctgtttaccatgtgcagtcttctggtaagaaggaggtgaccggcgctaatgtactggtggctatctttggtgaaaaggattcgcatgccgtctactttctgaatcagcaggacatcagccgactcgatatcgtcaattatttatcgcacggtattacccgtatgggcgatgagagtgacatcgggcaagctgctgagaatgaggccaagggggatagtgaggcgaataagggggatgctcttgctgaatatgctattaacttgaatgaacatgcacggaatggacgaattgatccattggttgggcgcaaagatgagattgaacgtacgatccaggtgctatgccgacgtcgcaagaataacccgctctatgtaggtgaagcgggcgttggtaagaccgcaatcgctgagggtttggccaagcgtattgttgatcgtagtgtgccggaggtgcttgccgatgcggtgatctactcgttggatcttggcgctctggtggctggtaccaaatatcgtggtgactttgaaaaacgtctgaagggtgtgttaagcgcgttgcggaaaacccctaacgcagttttgtttattgatgaaatccacaccatcatcggcgctggttccgcttcgggtggcacgatggatgcgtctaatttgatcaagccagctttagcttcaggtgagttacgttgcattggttcgaccacgtttcaagagtatcgcggcatcttcgaaaaggaccgtgctttggcgaggcgttttcagaagatcgatatcgtcgagcccaccgcgggcgaggctttcgagattctacaaggactcaagcctaagtatgaggcacatcacggcgttacctatgctgatgacgcattgcgcgctgcggttgatttatcggtcaagcacatcggtgatcggttgttgccggataaggcgattgatgtgatagatgaggcaggcgcgcgtcagcgtttgttgccggagaaagaacgcaaagagctgatcgatattgaggagattgagaccattgttacgaagatggctagggtcccggcgaagcaggtgagtgtgagcgataaggacgttttgaaacacctcgaacgcaatttgaagatggtgatctttggtcaggagccagcgattgagatgttgtcgtcggcaattaagttggcgcgcagtggcctaggcaatccggataagccgattggcaacttcctgcttgctggcccaaccggggttggtaaaactgaggtgactaaacaattagcacaccatcttgggatcgagttggtacgttttgacatgtctgagtacatggagccgcattcggtgagtcgtctgattggcgcgcctccgggctatgttggttttgatcagggaggcttgctgaccgagaagatcgtcaagactccacactgcgttctgttgttggacgaggtggagaaagcgcatatggatgttttcaatattctcctacaagtcatggatcgcggtgtgttaacggataccaatggacgtgaggcgagttttaaaaatgtgattctagtaatgacgaccaatgcaggtgcgtcccaatcatcacggcgtacgattggtttcactaagcaggaccataccagcgatgcgatggaagtgatttgtcgcagtttcagccctgagttccgcaatcgtcttgatgcgattgtgcagttccagcccctgggtttcagtcacattctgcgggttgtcgacaagttcatcattgagttggagatgttacttcaagagaaacgtgttgttttgtcggctacgccgattgctcgcgactggctggctcagcatggttttgatccgctgatgggtgctcgtccgatggcacgtgtgattcaagagaaaatcaaacgcccactcgcagacgaattgttgtttggtaagttgctcaacggtggtcgggtcggcattgatgtgcgtgacaatgagttaattgttgagacttattcggaaccagagcggttgtttccggcgaccgtggagtaatggtgatgttgctccacttaaggttgctagagtgatctttgtttctgtgttcaatcatgcttgaagccagccagcctgttattgcatggctgtataaaatgcgaatttatctgggcgcgggcataaaccgaaatgtcaacaatgacttctacttttaatccagtgaatttactgtctcggagatgtaaaaggcgggcagtcagaggaatgatggaatagcgttgctcaaaggcttgtacaagcaacaaaacaacattcaaaagttacgagccttcgctgcttggtaacaagagatttattgctgcttccgcttatgctgctaataaatagggttatttcatacgataaatgatacgccctttagttagatcgtatgcagtcatctctatttttacgcggtcgccggttaggatgcgaatgtaatttttgcgcatgcgtccggaaatatgagcggtaacttcgtgcccgttttctaacttgatccgaaaagtggtgtttggcagtgtctcgctgacagtgccttcaaattcaatgcaatcgtctttcgacatgtagtcctgtgtgcaatccaaagcgccgcccggcgggcagccaagggtaaacatcctacgcgctatcttggcacggcgcaaaatattttctttaacgtgatgaatgaggtggtagcttatacgagctctctactcagctgctctccgaacagtacactccaacaggcaggtagatcggtttgcgtgattaagcgacgtacgtaggctaggaagtcctttcgtggccagcgttcggcacccagattcagcaagtgctggttctcgacttgggcatcaatgagtggtgcgctatgggtgtgtaagaaatgtgcaagactggcgagagcgattttggaggctccgttgcgagtactgaacatgctttcgccaaaaaacatgcgtccaagtgccacgccataaataccaccaacgagcatggtgccgtcaaatacttcgaccgaatgggcataactatgttgatgtagcgtgaggtacgcttcgcgcatattcgcagtgatccacgttccatcttggccgcggcgcggggtagatgcacaggcgtcgattactgcggcgaacattgtgtcggcgcgcacggtccaggttgaagtgcgtaggttgcggcggaagcgtctgctcagatggatgctgtcactgcgaaacacggtacgagggtcaggcgaccaccacaacggcggttgtccttctgtgaaccatggaaagatgccgttcctataagctgcgagcaaacgttgtggggtcaggtcaccgccgattgcaaggagcccatttggttcgcgcagggcgtattccgcgggtgggaatggtgtattgggtgcgggagagagcagatagggtggggaatgcacgcgtgttcggttcagtctttacggaatggtgaatgtgcaattagttcgtgcatatgggctgtgattgtgatgcgttccgtggcacaccagtgcgccaatggtattcggaagcgaggatcagagatccagtgtctgctacgcacctcggttggtaggaatccgcgtgcgattttgtgcttaccttgagcgcctggctcgaagcgggtcagaccctcgcgtaggcagtaatcaatgccttggtagtagcaaatctcgaagtgcagtcccggcaatgctacgccgccccagtggcggccgtacagcgtctttgcaccgtgtaggcatagtgagccgccgatcagcttgccgttaagtgtggccatgaacagcaccagttgccgcggtatggtctttgccaggtgtgtgaggaatggtagggtcaaggcgggtgcgttgccgtactggtgaaaggtgttcacatagaagtgatgcatcgctttcagttcgataggggttgcttcgtcgccatggatggactggatgcgcaccccggtgcgggcgacttttgcgcgctcctgtcggatgtttttgcggtgcttatggtccattgtggctagaaatgtatcgaaatccgaccagcctgcaatattgcaccaatggtactgcacgtcgcttcgggccagccaaccgtcatcggtggtgccaaatgcgatttcttcttcatcagtatgaaagttgatatgcgccgaggaaagattgtcttgcgttactctagcctgtattgctgcgagtagcgcctgacgtttctccgtatcgagtgctaataagcggggaccagtgactggagagtaagggataccgcacaaccacttcgggtagtaggcttgtctttggagtgcataggcctgtgcccatgcgtgatcaaacacaaactcaccgtgcgagttgtacttcagatagcccggtgcggcggcgaccagggtgctgttgtcccatagggtaaggtgtagtggctcccaaccccaggatggacgtagacagccatattgctctaggccggataggaaagcatgcgttaggaagggattgctgccatcgtgcagtgcatcccagatatcggctgcaatctcgtccagcgcattgagccaacgtacctccaagctcatcatcatgttccggtagtggaccccattgtttggatgccgtcgttgtagaagttgatacccagcgtgattagattgatgagcgacaaaaaaacatgctaatgatgggcggagatatccactgcagagttctgaattgatcgccaagttgcatgtgatgtactgtggtcgcgagttgagcgataggcattatgatccaatgctcagtgacggaggggcagaaactgactgcatgtaaggggatgctgattatcaagagagcgactaactgagccgatccgggcttgttgggtgatatcgcttgagatcggcggtgcgttgatcccctaagggcagtgattcgtgacctgttcctcatgacgctttcaaatatgaaatggtcgattgggattcgcggtgtttgtttgtattgctgatgctgtactccaatggttcagttacctttatcaaggaaccgttccgcgtccagagcggccatgcagccaaatccagctgaggtgattgcttggcggtagtgttgatccgcaacgtcacctgctgcgaatactccctctacggaagtttgggtgacgttgcctgcggtgcctgaatggatttgcaggtagccgttgttcattgcaagttggcctgcgaaaagatcggtgttgggatgatgcccgattgccacgaagaggccttggacatcaatgtcacgcgtgctgctgtcttgcgtggatcggatccgcacaccagtgacgctagcatcgttaccgagcacctcctcgactgcgttgttccagatcaattctattttgccagttgcagctttcgagaacagtttgttttgcatgattttttcggcccgcagtttgtcacggcgatggattaagtaaaccttacgggcgatgttggacagatataaggcctcctcgacggctgtgttaccgccacctatcacggctacatcttggtcgcggtagaaaaaaccgtcacacgtcgcacaggctgatacccctcgacctttgaatgcctcctcggaagggatgcctaagtatttggcgttcgcacctgtggcgatgatcaacccatcgcaggtatagaggccgctgtctccaaaaagggtgaatggacgtgtggaaagatcggctttataaatttggtcgaaaatgactttcgtgtcgaagcgctcggcatgggcttgcatccgttccattaggtccggtcccatcaggccatgcgcgtcaccaggccagttatcgacttcggtggtggtcatcaattgtccgccctgttgcaggccagtgattaatactggttgaaggtttgcacgtgcggcgtagacagcggcagtccatccagctgggccagagcctaggatcaacaagcgtgagtgtttggcagaggcaggataatcgctcatgtatacttgcttacttaattaattgagagttgggacagattgcagcggattactagcttgggttcgcgtcatagatattgtccccctttgtcggtgaatcaagccgagttgctggatgtgcaacatcctatgtgcatggtcagcctaagtggagcgccaactcggtgactatacccggttctgcatcgatatgagtgcagctgaaaccaagttcaatgtcatttattatcaattactaatgcagcactcctaaggtttagtaacaagtggcaaaacaagttcccgagcgcagcaaacccaacgcgggtaagccttccatacgcaaggtatggagtgtgaatggccatagactgaagcgacataagcttttgcgggatctggtgttgatcatgatcgcaccggtattggtatacctcatggcgagtttgtttacctactccaaggatgatccgggttggtcccagagcggtagcgcgattgtgcacaacatcggtggaaaggctggtgcttggattgcggacgtgctgttccagctctgtggcttcgttgcttttttgctgccagtggcattgggtgttgttagttggattgccctgtttggcagtgaccaagaggagcaagcggagggacatttggagccagcgctccgtttggtgggtatcgtcggttttttgattgcagcgacaggtttatttcatctgcacttgtttcagagtgatgtggcgcgcgctggcggcattcttggtaaacaggtgtgcaattcactacaagcgggttttggtgtcttcggtactaacttatttgtcttgatgttgctgttaatttcggtgacgttggcgaccggtttgtcttggtttgcattgatggagcgcattggtcgtgctgtgcttgcagttccaccgctgctgcagaagagcaagcgccgcgccgacgaatggcagcatgcgcgtgccttgcgtgaggagcgtgaggaagtccgcaaaattgatgcggtacagcgtgccaaacgcgatccgatgaagatcgaattacctcctgagccgatagtggagaagagcgagcgtgccaagcgtgatacgcagatccccatgttccttggagtgaacaagcgtggttctgacttgccgtcattggcgttgttagataatcctaaaccgcagatcaaaggctactctgatgagacattggaggcgctatctcgtcagattgagttgaagttcaaggattttcgtattgatgtacaggtggtgggtgcctatccgggaccagtgattactcgctttgagattgagcctgcacgcggcgtgaaggtgagccagatcagcgcattggataaagacattgcgcgcggcttatcagtcaaatcggtacgcgtggttgaagtgattccagggaagtcagtgattggattggagattcctaacgtcaaccgcgaaatgatctttctatccgaactcctacgttccaaggagtacgacaagtcgccgagttcattgactctggcgctgggtaagaatattgctggtcggccgacagttgctgacttggcacggatgccgcacctgttggttgccggcactacgggttcagggaagtcagtggctgttaatgcaatggtgttgagcctgttgttcaaagcctcgcacaacgatcttcggatgctgatgatcgatcccaagatgcttgaattgagcgtctaccaaggcatcccacacctgctggcgcccgtagtgaccgacatgaaggaggctgcgaacggtttgcgttggtgtgtggctgagatggaacgccgttataagttgatgagtgtggttggcgtacgcaatttggccggtttcaacaagaaggtgaaggatgctgaagaggctggtcagccattgatggacccgctttttaagccgaaccctgacctgagcgaggtgccgcggccactgcaaaaattgccgtttattgtcatcttcattgatgaatttgccgacatgatgatgattgtcggcaagaaggttgaggaattgatcgcacgcttagcgcagaaagcgcgtgcggctggtatccacctgattcttgccactcagcgtccctcggtggatgtgatcactggactgattaaggctaacattccgacccgtatcgcgtttcaagtcagttcgaagattgactcgcgtacgatcctggatcagtccggcgctgaaactttattgggccacggcgacatgctgtatttaccgcctggtacagcaatgccggagcgcgtgcatggtgcttttgtcagcgatgatgaagtacatcgtgttgttgagtacttgaaggctagtgccccagtccaatatgtggatggggtgcttgatgagattcaaaccatggatgatggtgtggtgatcggtcctgctggatttccggagagtgccagcggtggtggtgatgagaccgatccgttgtacgatgaagctttacgtattgtgaccgagacgcgccgtgcttccatttccagtgtgcagcggcggctgaggattggttacaaccgagccgcgcgcttgatcgaagcgatggaaacagcgggcgtggtcagtccgcccgagcacaacggtgatcgcgccgtgttggctccaccaccgcgctaaggggtctcacaacaggtaagcaagtaacgggtctcacaacaagttagctcatgctcacctgtgttcccgttaaatcaggtgcttgtctcacgcttcgcgagattttttatgaggatctttcagtcggtgttgatctcatctgagtggcagccccgaccctaccgcttgaattggatcgcccatcatgatgcgtctgttgttttttttgctattgaattctatttgcatcgttacagttgctcatgccaggactgcgcctgctgctgctcaaacggacggtaacttcagctatttgcgttaccgtgctgattacgcagtgcgggctgatgcgagtagcgtgcagaccaatgaatacgatatccggctcaacacccaagcggcggtagagcagtttagccaagtgcgtcttggctatagcgagaagatgcagaagttggagatcttggaggcgtatacgattactgctgcggggatccgccaggatgtggctccgacaaagatttacacccaggagagctattccagcgcttcagcggcgatgtacgctgactataaggttaaagttgtggtattccccaatttggcaccgggtgcgcgcgtggtgtatcgcctccggcggactcagctcaccccttacttcccaggctatttcggattttgggagacattcagtgtatttacccggtatgacgatgcagtagtgacattacgtgcgccgcgcaagctgtcgatgcacgtctgggtacgtggggtgcatgggttcacccgaccgcgttttcagggtgaccaggctcgctgggagtggcgttaccggcatagtgtgccgttgcagagtcagacgtggagtgcggcccaatgggaatttagtccgacgatcatggtgagcaccttcaaggattggtcacagttgggtcacgcttatcatgtcaaagcaggtaaagcggccgcggtcactccacgggtgcgtgctttggccgatcagatcactgctggtagtgccgggcgtcgagcacaggccgctgcactgtacaactgggtagcgcgtaacatccgctatgttgcggtctatcttggtaacggcggtttagagccaaacagggctgatgtcatcctcgagcagcattacggtgattgtaaagatcatgcagtcattcttgaggcgttgctcgcagccaaaggtattcaaagtacacctgttctgattggtgctgatggtggaccgacactgccaccgattgcggtactcggtcgtttcaaccacgccatcaactatgtgcccgagtttaatctttacctggattcgacaaatccttacgcgcgctttggtcagcttccagccagtgaccttggggtaccggtcgtgcatagcgctgacggttatgtgactcgtacacctccccatgatgtatgggccaatacttacgtggcccgcactgaataccgctttgcccaggatggtagtttgagtggagagaccatgctggatctggggtcggatggggaaattgcgacacgcgcaatgtttgtcgagcttaatgcgcagaatcggcgacgcattgaggagagcatcctggctcagtccggttttgatggcgatgggatgttggagctgctggggatgccgcaggatctacagtctccattcagttaccgctatcggttcttggcgcgtgattatgttgatttttcgatggctggagggtttgcgttgccttacatgccaggcgccgagtcagtgcgtaacatctataccactacgcccgctgagaccaaccagacgccgttttattgcaacgaaagtttgcatgaggagacgtatgtactgcgctttccggcgaacgttccgattattgcgattcctgggagtcaccgttttcgcaatcgtgccggggagtacagcgtggattggtatcgcgacgggcagacaatcacggccatgcaccgattgcgtcatctagcgttgcgtggtcctgagaagctctgtttaccgggagattatcaggcgttccgtcagctttaccaacaggtaagacgcggctttcgtgagcaggtcctgtacggtgatttgcggcgcatagagaccgtagcgcattgatggttgattccagggtccagaattggttagaaatttacgcgttgttggtgtatagaggggcaatatgaatgctgacttgagtctctgtggagcgtttcaacaacctgcaaccgcttatacagttttgccttaataaataatgcaaacgacgctacgggttctttggggagacaatcaatacttacggtattgcgcagttgtattggttctattgtggggtgttgctgatacgttacaggcatggcctctgatcggaggtttgcaccgttgttggtgaggttgtatagcctttggtagtgatgcgggggtagctggtaccggcgatatcaatcaaatagacgcagtcagtgaactgatgtggcggcgtctatgtgttactcatcatctggggctatgctgggtgcttgttcgatactgttggtttgtttcaggctcagcatggcggttgctggaactgtaaagttgcaagggtactttgagcggtccgagccgtaatgagcattcgcctaatatattgcggagccgtcacaatctgagcttttcatgatctggatgatgccgatgttttctcgttttcgttatattgtttttactgtcgcgttgctttcggggcctgtctgtgccggtccccgtgctgatttgagcgcattcactcgtggattgaagaccttacaggggcacttctcgcaggaaatcattgatactcagggtagggtgaaggagcgttccaacggtaccgttgctttgtcgttaccgaatttgctccgttgggaatgtgatgcgccctacaagcaactggttgtggccgatggtaagcgtgtgtggctgtttgatcccgatttgaaccaagccagtgtgcgtcttcagggtaatgaggagcgcaatagtccgctgatcgcgttgattgatccgattcaactggatctcaagtacgatgtgagcgaggaggttgccatgcgtgatggtttgcgctggttgtcgttgagacctagagtgggtattgaggccagcttccagagtgcttcgtttggttttgctcagactcagttggcgagaatggagcttgtcgacaatcttgggcagcgtacggtgattgtgttcagtggttggcagcgtaatcctgtgtttgctgttgatacctttcgtttcacaccaggtaagaatgtcgatgtgatcggtgatcggtgaggttagtgggtgtatccctctttgctggattctcgagagagtaggagagaggggtacgttggcagccgtttttgatattcgtcgatccctgcgggcgggcgtcctactcacgatacaatgagacgtgacacgacagcgctttccgactcttcagcatgatttgcttggtgtggctcctctcttgcagccgctggctgagcgcatgcgtcctcgtactcttcatgagatggtaggacagaagcgcttgcttgccccagatcgtgcattgcatcgtgcggtggcttccggacatgtgcattccatgattttgtggggaccgccagggtgcggcaagacgacgttgtcactgctgttagcgcagtacattgatgcagaatttcatgcagtctcggctgttctttcggggttgccggaggtgcgtcagatcttggctgaggctgcgcagcgtttttctgaaggacgccgcaccgtcttgttcgtggacgaagtgcatcgttttaacaatatgcagcaggatgcgtttctgccgcatattgagcgtggttccattattttcgttggtgccactactgagaatccatctttcgaattgaactcggcgttactgtcacgttgccgtgtccacgtgttggaggcagtgtcgtcacaggatatcgttgtggcattgcagcgggcgttgcaggatacggagcggggtttgggtgagcagaagattgaagtgtctgaagcctctctgttggagattgccaaggctgctgatggtgacgtgcgtcgtgcactcaccttgttggagatcgctgctgagcttgcccaggatgaggatgggcagatgaccgctgacttgctttcgcaagtgcttgccgatcgtagtcggcgcttcgacaaacgtggggagcagttctatgatcagatttcggccttgcacaagagtgtacgtagttccaacccggatgcggcgttgtattggttgctgcgtatgctggatggtggttgtgatcctatctacttggcgcggcgcttgacccgcatggcgattgaggatatcggtttggctgatccgcgtgcacagtcgatggctctggaggcttgggacatctatgagcggttgggtagcccggagggagatctggcgttcgcacagttggtactgtacttggcaagtactgcaaaatcgaatgctggctatgttgcgttcaatgtggccaaggaggacattcgccagacgggtacccaggatgttccgctacacctgcgtaatgcaccgaccagactcatgaaaagtctcggttacggtatcgagtatcagtacgatcatgatgctgagaatggtgttgcgctggaacagacctgttttcccgatgcgctgggggagcgtatttactaccagccggtatcccgcggtctggagattaagctgaaggagaagttggaccagttgcgtgcagcacgcgctcagattcaagcggataagccgcagcggccgcgtgcatagaagatgacatcgctcctcaagctgttttgtgtcttttacttttttccttcctcatgggttcatgtccaattggagcatgtgatgctggaaatttcgctcatcttcctcggcattgttgttctttgccttcgaggtgcagaatgaatgctgttgtgtggtggcaatcgctgttgcttgtgatgctgggtggtgcgttcggttccgggctgcgctttgtgattggtagctgcttgctacagcgctttggtgctggattcccatggggaacgttagcagtgaacttgattggttcgttcgtcgcaggcttcctgctgatatggttggataaacggggatcggcgggttggtcttggcggatgttgttgattgttggcctgattggagggctaacgacgttctcctctctgatgatggagtgtttggtgtttgtccgttccgatcgctcgctgatggtcggtttgtacttatgtatcactttactgtttggtttgttgtttgtgtttctaggtgcgcggctgggtgcctttgtttgtgatgatcaacgcgtgttggaaatagatcgcactgcataatgtcccatgttgatgaatgcaccgtgcggggctgtcattggacttctaatcgtttgtatgcagcgccctgtgtgacgatcattcgcaataatcaacgtctttatgttcaagtattgctggccttgtggatacgcgactgaattggatgtttgcgctattttcacgctggctcaacgtatgatgcaattaattcagtgatgtcgcagctttgtataaaacgacgcactttcattgcgcgatgcaggtcagaaagggcaacgtttgtaggcgcgtggaaatgcgaaatccaatctgagtgaatgatctaagacaacgtatcaaaacggtatgtacctgcttctgcatgtggttgttatgtttccaatcgggggatattgcagtagcggcaaacgctgcctcactgcggaaaggtcgtgaaattggaggcgtgtaatcaggtgaagtacggaaactttcaccatttctgtggattggtacgcaggatcgagtgattgatgatcttctcgtatgccagctaatcccatacttggcgtgccgttggagcttgagtgcttgccgggatgcggattggttcttaaatgctgtcgagatgtttggcctatatcctgcgtgttcgagtgacatgcgtccggacactatttgggaataatccatgtcgcaacaggctgagaaactgggtttgttgaagattctgctgatcggggattcgctagaggacgccaagttactgttcaacacgttgcgtgaggcagggttggatgggagttttgagcgtgtggagagcgaatcagcgctgcgtgaggcgttgtatcttttcgcgcccgatattgtgctttccgatctgagcatgcctggtttccccggttatcaagcgttgcgcgtggtgcgcgaggtgggcaatacgccgtttatcttcgtctccagcaagatgggtgaagatattgcagtcgaggcgttgcaggaaggtgctaacgactacatcatcaaacaaagtttggtgcgcttaccaagtgcggtgacgcgcgcggtccgtgagtcacgtgctgagctagagcgtcagcacgtagagtcagagctgatgcgtgcgcaaaggctggagagcttggcgatgttggcggctggtttcagtcacgacctgcgtaatattttgcagcccttgctcattgtgccggacctgctggcgggacggaccgatgatccgcagttgcgtcaattggtgagcatcgttgccgagtgtggacggcgtggtcacgagatggccgaatcaatgctttctttcgtgagaggttccaataagccgcgtgagcgggttttattggcggatctattccagacagtgcagttactgttgcgtagtagcgtgcctgattgtattgctgtgcttatggaagagtgtgaggaagatctcagcgtggaggccaatcataccgagctacagcagtgcttacttaatttggccttgaatgcgattcatgcgatgccaaccggtggtcgcttgaccttagttgcagagcgccatgatggcgaccgtatttgcattagcgtgactgacaccggtattggtatgagtgaagagacccgggcacggctgttcagtccattcttcacgaccaagtccgacggtaccggtttgggactgatttcttgcaaacgcattgctgagagttatggtggcttgattcaggtctgtagtgagttgggagtcggtacgcgttttgatctgatcttgccggcacgtgcaccggcttcaagggtgtcagaggaaaatgtgcctgcagtacttggccatggccagcgtatcttgatcgttgatggagaggcgacgcgtctgtcgttgctgggaaatgcgctggccagtcagggctatcagccgcaattggctcccgatggtggtgcggcactaaaactattgcgtcatcatgcagagccggatttagtcattatcgacagtgacatcctgttattgtcggcggtgtgtctgctcccgacgatgcaggagttgggctacagggggccggctatcgtacttgaggatgctggtcagtctttgcgccgtgagcatttctcgaaggacttggcggttcacatgttgcgaaaaccattagagatggggcgtgtatttcgagccgtggcgtatgcactgacataacgtatgacgtagtgcgtggagtttttgacagaacacttagcgtgcagcacgagggcagcaataacgctgcctgcatgcatgcccatgacggaggttgacgttgtctctggttgcatgcgcgaatatggcatgactagtgtgcttctgagtttaggtagtaatgtgcgtcccaggtattacttgcgtcaggcagaagctgcactgcacgctttttttggtgaagtgttgttttctcctgtctaccgcactttggctgtgggttttgacggtccggatttcctcaatagtgctgccatggtgcataccgctatgccgctgtcagatttgcatgcatggttgcatgcgttggaggaacgctatggccgtgatcgcgccgtgccgcgttttggtaaccgtacgctggatgtggatgtggtgttctatggtgatctgatcgtgaaagaaccaggtggggaatactgtattccacgccgtgagttgaagcatagttttgtgcttaaaccattagtggatgtggcaccggattttgtcgatccagtcagtgggcgtaccttggcgcagttgtgggcggtgcatccacacgtcgaggcatgtttccaggtcgtggatcttgaagtaccaggtgacgatagagacatgatttagataaacatgttcatgtcagcgtgcggccgccatccaggcgcagggtatgtccggtgatgaaattggcactttctagtagccatagcactgcttcggcgatctcttccactgtgccggtacgtgctaatggggtgcgtgccagcagcgcctgcttcgctgcttccgctatgccttgcgttggccataggatcgccccgggtgcgatagcattgactcgaacttgcggtgccagttccagtgcgagtgatcgagtcaacatctccagagcggctttggctgcggtatagacggcatgtcggcgcagtggctgcgtgccatgtagatctgtcaggttgatgattgccccgcgatgtttgcgcagcagtggtgtggctgcttgcgcgaggaagaaaggggccttggcattgattgcaaataaatcatcccattgtgctggggtcacttcgcccagtggggttggatagaaattggaggcgttgttgatgagcacgtccagccgtccgaagtgcccagcacagcgtgcgatcagcatttctgggactgcgttttcgtgtaggtctccgagcaatgcgagtgtgctggatggacgcgtgcgttctagctcagttaaaaatgcatgcagttcgtggccagactggtgtgcgtggacggcgacgcgataaccatgtgcatgcaggtgatgcacgatcgccttgccgatccgacgtgcgccaccagtgatcagagcgactttagagggatctgacatgtggggttttaccctggagaaattgatcttattgcttagactatgactatatagttcttagttgatttctgaatttgattgaatacatgtgtactgatgcccttgcccccttgcctgaagcgcttgcccacagcgagcaactggcagcctatatacgccaacagatgattcaaagcggcggggcgattccattctctcgttttatggagctggctttgtatgctcctggtctgggttattacagtgccggcgcgagtaaatttggtgaggctggcgattttatcactgctcctgaattgggatcgctattcgctacaactgtagcgaatgccttggctccggtgttgcagcaactcggtgcgttggcgtgtgtgctcgaattgggaggtggcagcggcgcattcgctgaaatgctcctcaagcgtttgatggaactgcataggctgccgcagcgctatgcgatcctggaacccagtgctgagttgcgtcaacgtcagcaattgcacttgaaacgcacattgcctccatcccttttcgccttggttgaatgggtggatgctcccttctcggagcagtgggatggcgtggtgtttgccaatgaggtcattgatgccttacctgcctcgcgtttcataatgcgcgatcgcgaagtgtacgaggcaacagtggtattggatgcacagcagcgctttgtatctgcccaacacccagccgatgcactgttgcagcaggcagtgcgccatattgagcgcgacttgtcagcgcgctttgccgacggttattgctcagaggtgttaccgcaactgccgtattgggtacaggcggttgctggtggcctcaagcgtggtgtattgctttttatcgactatggttatccgcgtaccgagtattaccgctcggagcgtgacactggcaccctcagggcgttttaccggcatcgcgtgcatgatgattggtaccgctggccaggactacaggatgtgactgcttcggtggattttaccgccttggccgaagccggcaccgctgctggttttgatatggctggttattgtacccaggcgagctttttgctcagtcatggattggatcggttgcttgctcacgctgaagagggtgttgatgaggtggctaagctgtggttgcgtaaccaagtgaagcgccttaccttgccaaccgaaatgggcgaacgttttcaggtgatggggtttgctcgtgaggtagagttcgatgatgcgttcttgacgggagacctgacatggcggctatgagcgttttattgagaccgcgttggcgaccgctactgtggctgggcttgtggattgccgcaatcctggtcgtcatcatcgccagcgtgttgccacagaaggatctgccacaggtgcctgctggaggtgacaaggtggaacacctgctcacttattttctcctggcttggggagcggcagtattgttcgtgcgtcccctggttgtattggctgtgggaatggggttggtgctgctgggcattgggatggaggttgctcaggggatgtttactgtggatcgggtccctgatgttgctgatgctttggccaatacggtgggtgtcgtattgggcatgttgatgcgtctaacgcccttggatggcgtgctggtgtggcttgacacctgtttgtttggttcgcgtcgctgaggtctggggcattatttccttaagttgcttttttatttaagtaccagcgtgccgcacctacgatgccgagttgcccatgttcgatcagccgcaccgggacgtgctgtaatgcctcgcccatggggcctttattgaggaagcgttcgacaaagtgactgcgtagcagcggctcacgcagctgtggcaggattcctccggccagatagacacccccctgtgcaccgtacatcatgaccaaatcaccaacgatgctgccgaggaagtcgcagaatacctctagagtctgtgatgacagcatgtctgttcctgctgccgcagcgtgactgatcgcatctgggcttgcgtgctgggggaggacggactgtagcgcacacaaggcgcggtacacattgagtattcctggcccagataaagcatgctcaatcggcacatgtgtgcggttgttcagcatgtgtcgtaccagttgcatttcaagttcagttgtactcggcaatgctgcttgaccggcttccgtagggaggacaatggggcgtccgttattgggaatccagagtgctgcacccaggccggttcccggaccaagcaacaggcgtggcccatcctgcgctttggctggaccagtgaggtgcagcaattgcgcagcctccatatcctctgtggcgtaggccagcgcctcaaagtcgttgaccagagagacctctgccagatcgagatctgcgcgtagccggtgtggtgatagcggccacggtaggttggtagtgataacagtaccatcgctgcgctgaaaaccggcactggcgatgacgcaatcacgtactgctgatcttgtaccgaggaagtcgttcagaattgtgctgaggctgggatagtcagcgcagcggtaagtgcgcacatccaacagttgcggtggactggcacacgtgggcgcggctgcaaccacgctgacgcgcacgtgagtgccgccgacatcggcggcaacaaaggacgggatattgggtgcatctcgggtagggttcggaatcattgaggtcactagcaatcttagggaaaagcgcagcgcggcgacgaaatattgattttcgtgaagatgatgacaacggtatcaatgagagtttgaacagggtgtcgttgatcgtcagctagctggtttcctgggtgttactcatccatggcgcgcatctccccggggtggtggcgatcatgacattggatgagcgttgccaggctttgtttggatgaaacgttacccaggatgtcgtgccaataatttttatattggtaatacaataatttttatattggtaatatattagatataacaactttgtacctgctagcgtgctcggcatgtccaaagccaaatctagagtggagagcagacctgcgtatgaatgaactgctgcttgatagtgctgctcccactctgttttatctggtgaatcgtcaccaaggacagccacttttgatgaccgcgcagctccatcaccggcccagtggtttgaccagcttcagtgaaacgctgtggatcaaaggtgaccaaccggagcggttggttaagcacttcgcaatgggcgttgttgcagccgtcttgtacgtggtgcgtgtggggtatgcgcgtgatggcactgcgatcacactgacagagacttaattttcgcaacgttttcgatgatgttgtggtcaaactacgctgttgattgtggttgacctccccccccttcccccaaaaaaacagttcttcacatgatgccagcccggttttccagttctactgtttccattgctatcgtcggcgtgttgttcttcattatcggttttctgacctgggtcaatggaccgctgattacttttgtgcatcttgtctttgatctgaatgaggtcgatgccttcttggtgctgatggtgttctacctgtcttatttctttctcgccttgccctcggcatggattctcaagtgcattgggttgaaaaaaggcttggcgttgagtttgctgttgatggccgtaggcgcggcgatatttggtgaattttcgacacaacggtattacgtgggtgcattggtcggcttgtttgtgattggcagtggtttaaccttgcagcaaactgcggtcaatccttacatcagcatcctggggccaatagagagcgcggcgcgacgtattgcggtgatggggatttgtaacaaggtcgccggtatcttggcgccgttggtcattggttccctgatgctgcatggtgttggcgatttgtcgatgcaagttgcaactgctgacccggcgatgaaggaacaactgcttgccgcctttgccgcaaaaattcatacaccatatctcatcatggccggtttgttggcagtgcttgcggtgggcgtgttgttttctccgctgccggagttgcagcctgctgacgtcaatcgtgtttcatccggcgataccacgcaaaagaccaacatctttcagttcacgcacttgtggcttggggtgttgtgcatgttcgtttatgtgggtgtggaggtgatggctggcgacgcaatcggcacctatggtcatgcactcggcttgcctttggaccagaccaaactgttcacctcagcaacattaggagcgatgttgcttggttacatgaccggtttggcggtgattccaaacatgatttctcaagaacgttatttgagtttatcggcggtgttgggtgtcctgttatcgatcggtgcggcgctgacgcatgggtatgtatcggtggcttttgttgctgcattgggctttgccaatgcgatgatgtggccagccattttcccattggcaatcaatgcgttgggtcgttttaccgagacaggttcagcgttgttgattatggggatcgccggtggcgcgatcatcccgcagcttttcgcctctctgaaacagtgccttgacttccaactggtgttcgctgggttgatggtgccttgttatctgtacattttgttttattccttgattgctggagcgatcaagggtcgcagtgtgcaacgtttagccctcgggaaatgacaaatgcgccgaccgaccatcaaagatattgcagaaagagcggatgtctcgttgaaaaccgtttcgcgggtcatcaatcacgagtcctcggtgatgtcggccacgcgggcgcgggtgctgcgtgcgattgccgatctgaattacgaaccggacccatccgcacgcaatctgcgtagtgctacgccgtgtgtcatcggattggtgtatgacaaccccaacccttaccacatcatcaatattcagaatggtgtgctcgcggcgtgccgtgaaatagggtttagcttgcagatctacccctgcgattcgacgtcgccgctgctggttgaagagttgactgagtgggtgcagcggtcgcgtcaggctggcttggtactgactgcgccaatgtctgagcgcccagagctgattgccggtctgattgcgcgtggcatcaaattcgttcgtatcattgccgctactgaggatccatgcgatggtccatgcgtctatatcgccgaccgtaaggcagcttatgagattaccgagcatctgatccagcttgggcaccagcggattggttttctttgggggggcgctcagcatcgttccagtggtgaacgttacgctggttacgaagcggccttgaaagattacggtatcgatctcgataagcgcttagtggtgccaggtgattacacgtttgacgatggttttcgtggtgcgcgtcgtttgctggcgttacgtgatcagcctactgcgatctttggcagtaatgatgagattgcggctggtgtgttggctgcggctcgctcagtgggtatcaatgtgccacatcatctttctattactggttttgagaatagtccattcgcatctcattcctcaccgacactgaccacggccagccagacgacggacgagattgcacgccatgcagcacgcctcctgattggccagttgcgcatggatacgtgtaatgagcagagcatgccgttacaaaatcgcggctttgtgccgcagttagtggtacgcgcttctaccgcgccagtgcgacagacaccctttattaagactccctctcacgatctgtcatgacgttaccgatccctttgcttgaaccagaacaaacactgatgtttcgtgaggcagcacaggctgccgcagtgattgccacacagttcgaacgtaacgcagcaacgattgccacactggtacgggcattgcgtgctgatccccctccatttgtggtgacatgcgcgcgtggcagttctgaccacgtggccacctatgccaagtatttgttggaaacgcagttgggtttggtgacggcttcggcctcgttgtcagtggggtcaatctatgctgcgtcgctacagttgcgtggtgcgctctatctggtgatctcgcagtcagggaagagtccggatctgttgcgcaatgtggaagcggctaaggcagccggtgcacgtgtggtggctttggtcaacgtcgaagactcgcccttggcatcgctggctgacactgtattgccactgtgcgctggtccggagcagagtgtcgctgcgaccaaaagctatctggcctcgttatctgcggtgttgcagttagtagcggtatggaaggctgaatcggggttgctggcggcgttggatggtatgtctgatgcgttgcgcactgcttgggagtgcgattggacaggcttaattgatggcttggtcaatgctcgcaatctgttcgtgcttggtcgtggctttggcttggcgactgctcaggaagcggcactcaagttcaaggaaacctgtggcctgcatgctgaagcgtacagcgcggcggaggtcaagcatgggccaatggctctggtgggttcggggttcccggtgctggtgttttctcagtcggatgggaccgaagcggcggtacgtgcattggcccatgagtttcgagggcgcggttccctggtatggctggtagcaccggatggtgatctgcccgttggggtggccgcacacccggtgtgtgcgcctttgttgtcgatccagagtttttatcgcgcgattaatacgctggcattatgtcgagggtataaccctgatctgccgccacatttgaaaaaagtcacggaaacggtgtgatgggtgcttcttctggggtcgccggattcatcaatggccgtgtcctgatcgataccgggttccgtcatgatctggcggtgctattgcgcggtggatgcattcaagcactgctgccgcatgatgatccgcgggtgacggagggggcgcagtggatggacttgcggggaggtctgttgctgcctgggtttatcgatatccaggtgaatggtggcggtggtgtgctgttcaataatgcgcgtgatgtggatgcgttggcgacgatcgcgcgtgcgcaccgtcgctacgggacgacgggactgttaccgacattgattagtgacactgtggaggtgatggctgaggccattgctgccacgcgtgccgcgattgctcagggggtaccgggaatcctcgggattcacttggaaggcccttacctcaatccgctccgtaaagggacccatgaccacactcagttccgtgtgccgcagttgcatgaggtgatgcggtgcacggcattggataacggggtgactctggtgacgttggcgcctgagcaggtgccgcttgagatgatccgtgtttttgtcgagcgtggtgcgatcgtctttgctgggcatactgcagcgacgtatgagcaagtgcgcgctggcatcgcagcgggtgtcacagggtttacgcatctgtacaacgcgatgtcgcagttagtcgggcgcgagccgaatgtggtgggtgctgcgctggaagatccggatacatggtgcgggatcatcgttgatggcgtacacgtgcatccggcgagtctgcgtgtggccttagccgccaagccgcgcggtaaggtgctgctggtgaccgatgcgatgccgccagttggcagtgacagtgttcactacgatctctatggtgaaacgattacggtgatggatggtgtggtccgtaatgcggctggtgcgttggcgggtgcggcgctggatatggcaacggcggtgcgcaatacggtgcattggttgggtgttgatttggctgaggctgtgcgcatggcctcgacctatccggcgcagtgcatcgggttaggggatcgtctggggaggattgcgcctggttatcaagccgacctagtgtggattgacgacgacgtgcaggtacagggcacgtggattgctggtgtgggcgattgagtctctagagtaagtaagtgcacggttgcttgggtaacagcagtgggattagggcggtcatggtgtgcattgtttgagctgtgccaatatggatcgcgctttacactatgtttctaggttgccggttttaagcgggcctcagatcaagcccgatagattgggtaatcgtagtgcattgatttttgtatgactcttgatgctcagaggagtgagcggttgagtcaattcaattccagcatttctcggagtgcgcaggtgggttcttaaatatcgggtggattcattcaatcaccgctgcgttgattagcacgtgagtatcgttgttgaacatgtggaggggctgacagttttaagtagctcttttttgatggtgttggatgaataaataaacgtactgatgcgtgctaccgtgctggacggtgagctagactgtcacccttctgtggccttgtggccaccttgaagggattgtcttgcacgtatgagttggctcagcaaattgatgccttctggcattcgtaccgaaaatactgcgaacaaaaagcgtggtgttcctgaagggctttgggagaagtgcagcggctgtggcgttgcgttgtatcgtccagagttggaagagcatcttcaggtgtgcccgaagtgtggccatcatatgccgatccgtgcgcggatgcgtctatcggcgttgtttgatccattgtcaacgactgagattgccgggcgtcttggcccgacggatgtgctcaagttcaaggatcaaaaaaagtacgcggagcgcatcaaggcgacccagaagagcagcggtgaatatgatgccttgattgtgatgcatgggctgctcaagcaaaaaccgttggtggctgccgcattcgattttgcctttatgggtggatcaatgggttcggtggtgggcgagcgttttgcgcgcgctgtggaggcggccattgagcataagtgtccgtttgtttgtttttccgccagtggtggggcgcgtatgcaagagggccttttttcgctgatgcagatggctaaaacgtccgctatgttggggcgcttgcgccaagccagattgccttacatttcggtgttgacgcatccgacgacgggaggggtgtctgcttcattcgccatgctgggtgacattaatattgccgaaccgcaggctttgattggtttcgctggccctcgtgtgatcgaacagacggtacgcgagaagttaccagaaggctttcagcgctcggaatttctgcttgcgcatggaggcattgatcagatttgcgatcgtcgtgaattacgcgaccgtctggcggatcttatggcgttaatgatgcgtcatcccaggccggatagcgcatcacaggcgatgcgggggcagtgagggtgtccaggtattttggtaccgatggcatccgtggccgcgttggccaggggttgatttctgctgattttgtattgcgcctgggtaacgcgcttggtcgagtgcttgctcagggccgtgatacccgtccgatggtgttaattggtaaggacacgcgtatctccggttatatgtttgagtctgcccttgaagcgggtttggtggccgctggcgctgatgtgcagttgatcggtccgatgccaacacctgcgattgctttcctcaccaatacgctacgggctgatgcgggcgtggtgatcagcgcatcccacaatcctcatgatgacaatggcatcaagtttttttccgcgatgggtgaaaagcttgacgatgcgacagaagcggccattgaagcggcgattgaggcgccattcctgaccgttgactctgaatatttggggaaggtcaagcgtacacgtgatgcaattggccgctatatcgaattcagtaaggcaagtgtgccgcgtggttttacgttgcgcgggttgaagttggtattggattgtgcacatggcgccacgtatcacatcgcaccgatgctgtttcgcgaattaggtgcggagttagtggcgattggtgttgatccggatggtttgaatatcaatgccggtgttggctctactcacttggagactctcgctgccacagtgcgtgagagcggtgctgatttgggcattgccttcgatggtgacggtgaccgggtgctgatgacggatgcccaaggccggactgtggatggagacgacctgttgtatgtgctggcgcgtgcttggcgtgccagtggtcgtttaaagggcacggtggttgggacgttgatgagtaactatggtttagagcaggcgttggggacccttgggatcccctttatacgtgcgaaggtgggtgaccgttatgtgcatcaggcattggttgagagtggaggggtgctaggcggtgaggcatccggtcacttgttatgtttggatcgcgcaaccacaggtgatggtatcgtcagtgcattacaggtgttggaagtgttgcgtcatgaggggctgacgttgagtcaggcactgctgggtttacataaggtgccgcagaagacggtcaatgtgtgttggtctggtccagccagggctgcagtcgagatgccggaagtacgtcaagcattggttgaagcgcaagcggcggtgcagggccggggacgggtgtttttgcgtccttccggcaccgagccggtggtgcgtatcactgtcgaagccgatgacgtcgtactcatgcagcagacgcttgataggcttgccgatgtggtgcgtgacgcggcgtgaattggatgtttttcgttgttgcagccaaggccacgacgttttatttcttgaagcagctttggtcatggtgagagtgttgtatctcatggacccggctgcatgccttttttatggcttttgaagcggttgaataatggtgcaatgagtgggtggtagctgagcgcgatgcgtttgcgcagccagtgccccgggcggttacggagcgcgaagcggtagatgtgttctgggttgccgccaatgacgttgcgtccaaagggatgtgtggtgtgaaaatagcgaaagccatgggcgcgtgcgatttcgatatggtctgcatcgaagtcgccgtatggccagcacagtgtgttggagacgttgcctaggcgttgttgcagtactgtacgtgcggtgatgaggtctcggtcgagaccttcgcgtcgttgggcgcggctgagttgtagtgttagccagcgtgtatgggtgtgtgtatggcaatgtgcctcaaaggtgcctgcggcgatcattgcttgcacttcgctccaacgtagcatcacttcgtcggtgcgcccctcatgcaggattgctgtttcgcactcatggtggtttggcgttatgggcaatatcgcgccggattgtccagcatggggacgcgctgggccatcgccaatccagctggtgacaatgaaaacgacggcatgcatgtggtatttctgcaagatcggatgtgcgtagacccagttatccagatagccgtcgtcgaaggtaattacgatcgatttgcgcggcacgggttgaccggcgagaaagccggcgtattgctccagggtgagtgaggtccagccgtcattcgccagccatgcaatctggctttcaaagtgttcaggggagacggagatcatgcccgttgatggtgaaacgtgatggtgcatgaggacagggacggatgttgcacggctcatttgccaagctcctgtaaccactttagatagtattgttcggtggtctttgcgtgtcctattgcgctgaatacagggcttttgcgaatccaatcccagccggcgcggcccatggagtggcgttgctggttgttggtgactaaggtatgtagcgcgtttgtcagtgccgtttggttgccgggtgttaccaagattgcattggtaccttcttggagcatttctggtactccgccaacgcgggtggcgatgatggggatgccggcttgggcggcttccagaaatacggtgcctgcggcttctttttgggtggcaagtgcaaagatgtcaaaaccgctcatgaggcgtggtgcatcgtgccggtaacccagtaggtggatttgcgtttctagtgtgagtgttttgcggtgtgccagtaggtgttgcatcacgggttcaccgtctccggcaatgaccaaatgcaggcgcgggttggcttggcataacggtgcgatggcgtccagcagttcacggtgtcctttggcttcgcgcagtactgcgacgcagccgacaatgatgtcgttgtcgttgaatcctagttctgtacgtactacgtgtcgcgtctgttgcaggcgttgccatgcgtgttctgggtcggtgtccatccacggtggctgcgcggtgatcggggggacgataccaatgcgggtgggttggatcccttgtttgatgagcaggtcacgcacatgttggctgacggtgatgacccggtgcggcagataggtgtaggtgagttgtgatttgatcggggccatcaggtgccgggagcggacaatgaggcgcgtgcgcgttaggcgtgcagcggcagcggcgatcaatgtatcgacgtggctggtggtattgaccacgtcgaatgtctcgcgctggagcaggtgttggacggtgtgaatgccgttgagcacgcgccaagggccatgcatgttgatgtgatagaccggcagccccgcgttacgtgccatggttgacaggggagcgccgggttggcaaagcagcgccatatggtgcccttgggcctgcatggagagcatatgacgataaatgtaaatttcctcgcctccgcagccggttgcagcttcggtatggaggattttcaaaggatgttgtgtcatcaaaggacggcacggaattcgcagtctgtggatgcatccagcatttttctgccggggcagtgagtaggatcaggtggtgagtgaagtagagataacagaacggatgatcgtatgttaatggtgtgtctgttttgttagataagcgctgttatcgtcgtttatctttgagttggtatttacttttagccatgctgatgcgacggggagtgtactttatattcttgggatctgtttgagtcgtttgattttgtcttgaatccgcgctctgttggttattgtgggcgactgtcactcaatagggcaatggttgtgttggatgacaaggtgaggggtgttgctattgatgggcaggcgcgttctttttctagtgttgttgtgtgtcctgtgtgggcgatttgctgggcatgatggtctctcagtcgtgggctatttgaggttgtgtgtgctgtgaatcatgcgtatcagcgtgtggtgtgatcgacagcgatgtgggaggggcgatcagcggttgtcacgggtccagatagtggtttgttcccgtttgacggggaatggcatcactggggtgtaggccggagcgcacagtggctggccgtttcgtatgtcgaaacaggcgctgtggagcgggcattcaatgctgccggtggttgggtcaaagtggcctggtgacagtgggtaatcttcgtggctacagcggtcttctagggcgtagagttcgccatcaatgttgaacacgacgatgggggtgccggtgatgtcgtcgcagacggttttcatttcgccgggtaggagttcggtctcagtgcatacgaaggtccaagtgtcattcatgtgtgggttccaaaaaatttttcaaaggtgttcaggcaagtattgtcgtgctgtggaatggtgccgtggtggtgagacgtcaggggagatgcagggatgcgggtcagcctagtagtttgcgtaccttgagcagggccgcgatgaagcgttctatctcttcgtgagtgttgtagaacgccagtgaggcgcggcaggtggcggtcactccgtagtattgcaggagggggtgtgcgcagtgttgaccagagcgtatggcaacgccttccaggtcgagcagtgtggccaggtcgtgggcgtgtgtgccttcgatcatgaaggaaaccacggcggctttgttgggtgcggtgccgaagagtcgcatgccgtcgattttctgtagttcttcggtgagatgcgccagtagttctgtttcgcgtgtttcgatctgctcgattccgatacgacgcacgtaatctacggcggcacggaggccgatgaagccggcaatgttgggggtgcctgcttcaaatttatgtggtggggtgttgaagagggtgccgtcaaaactcacttctttaatcatttctccgcctcctagaaatggcggcatgatgtggaggtgttcgcggcgtgcccataatgctccggttcctgtggggccgtagagtttgtgtccggtgatggcatagaagtcgcagccgatggccggaatatcaatgtggcggtgtggtgccgcttgggaaccgtcgacgacggtcgtaatgccgcgttgccgtgcttggcggcagatgtcgtgtatcgggttaacggtgccgaggacgttggacacatgcgtgatggccagcagtttgacttggggtgtcatcagggtatgcagggcatctagatccaaggtgccgttaggcaggatgtcggcgacttggatacgtgcgccggtacgttcagcgatcaattgccaggggacgatgttggcgtggtgctccatccgtgagactaggatcacgtcgccagcgcgcagtcgtggcagtgcccaggagtaggcaatgaggttgatggcgaaggtcgtgccgctgcatagcaccagttcgtgggtgggggcgtttagcagggttgccagtgctgttcgtgtggcttcgtaggcttcggtggcttcggtgcctagtgtgtgtacggcacggctgatgttggcgttgtggcggcggtagaaggtgtcggtggcagtgatcactgcctggggtttttgtgcggtgtttgcgttgtcgaaatagatcagcggttttccgtgtacgtggcgttgcagtagggggaagtcggtacgcaggcgttcccaatcgggggatgtggggggggctgcggaggtgtttatacggtccatgtggtgttcagtgcgtaattcagtggtgcgcgcaggatgtcggctagggtgctgtctaacagggtcagtggttcgtggcagaacgctgcgctgaggagctgttgtgcggtggtgtgtggaatgccgcgggtgcgtaggtagaacagggcgtgtgggtcgagttggccgacggtggcaccgtgtgcagcctgaacttcgtttgcgttgatgatcagcacaggttgtgtgtcgatctctgcgtttgctgagagcagtaggtttttgttcgatagacgggcgtcgctgccgtcggcgccttgatggatgtgaatgccgccatgaaataccacgcgactgcggtcggttccgatgccgcgccatagcagttcgcttgctgtattgcgggcgatatgttcgatgtgcaggcgggtgtctagatggcgtgtgaggtggcctaacaggataccgttggcggtcaggcgggcgttgtcgccttcaagacgtacgttgagttcatggcgtgacagttttgcgccgagttctacatcgacacggcggtattcagcgtcctgtgcgagcacggcgtcggtgcgcaggaatgaggtcgtggcggtagcatcgttttgcaggcgggcatgttccaggcaggcgcccggtgcgagatgaatgcgggtgaggacgttgttgaggtgggcggcgtggccggtatggagttggtgttcgatgagttgcagtgatgcgccgcagtgcagttcgatctggttgcgtaggtgccaggcgtggtctatttcacctgctggagtaataaagatgaggtggatgggtgtgttgacggtgatgttttgatggacacgcagcagtactccttcgtcggcgagtgcggtgttgagccgggcaaatgtttcatctctatgtttgaagtgggggggagtgcggtgtagtcctttgtcttgttctgtcgggggggctgacagggggtgtatggtgatgccttgtggcaagccagagaggttggagaggctgggactatggcgaccgttgatgaagaccaggcgcggtgtcgggatggtgttcagccatgcgggatcaattgttgttgcggtcgtgggtgcgggggtgaagtggcgctcttccagtgcacgtagcgatgtgtatttccatgtttcgctgcgtaggctgggtaagccgtcgcgacgtgcgtcgtccagtgcttggcggcgggtgatgtcaccgtcgttttggaaggcggcagccagggagtcaaggagggggttcatcagacattttcccggcgtgttggtctcttcagtctgggtgtgtcggtgtgtggatcatgggggaagggaggcattgcttcgctggtggggatgacgtgatttttcaaccaggtgtagccatgttgttctaattccagtgccagttcagggccgccggtttctacgatgcgaccttcggcaagtacgtgtacaacgtcgggtttgatgtagtcgagcaggcgttggtagtgggtgatgaccaggaatgagcgttccggtgagcgcagggcgttgacgccatcggcgacggttttcagtgcgtcaatgtctaggcctgagtcggtttcgtctaggatggcgagtttgggttcgaggacggcgagttggaagatttcattgcgctttttctctccgccggaaaatccttcgttgacgccgcggtgcaggagttcgtcttttaggtgcagtaccgccagtttttctcggacacgtttgagaaattgtattgagtcaagttcttcttcaccgcgtgctttgcgttgtgcgttgagtgccgagcgcaggaagtaggtgttgttcactccaggaatttccacgggatattgaaatgctagaaataatccagcggcggcgcgttcttctggttgcagtgtgagcagggggcgattgtcgaaggtcacttgacctgcggtgatgtcgtagccgtcgcggccagcaaggatgtgacccagggtggattttccggcaccgttgggtcccatgatggcatgcacttggccaggtgcgatgtccagggaaaggcctttgaggatttccttgccggcgacggaggcatggagcgtgtcgatcttcagcatagtcatgatgtctataggatgagcttgtgtccgctgatacgtttttatgggactggggcggtttggatgcgttgttggagtggttgggcgttagagggcgtccgggactcgggagactccatccactggtgttgatttagccgacagatccttccaatgagatgtcgagtagttttttcgcttcgacggcgaactccattggtagttcgcggaacacttgtttgcagaagccgtcgacgatgatcgagacagcgtcttcttcggcaatgccgcgggcgcggcagtagaagagttggtcatcgctgattttggatgtggtggcttcgtgttcgacggtggcgtttgggtgtttcacttcgatgtaggggaaggtgtgggcgccgcattgtttgccgatgagtagtgagtcgcattgggtgtggttgcgtgcgccctctgcgttgcggtcgattttgacgagaccacggtaggtgttttgtccatgtccagcgctgattcctttgctgacaattttgcttttagtgcgtttgccaatgtggatcattttggtgccggtgtcggcttgttgatggtggcgggtcagtgcgacggagtggaattcaccggttgagtcgtcgccgagcaagacgcaggatgggtatttccaggtgatcgctgagccggtttcaacttgggtccagattactttgctgcgcgcgccgcggcattcggcgcgtttggtgacgaagttataaatgccgccacggcctgcttcgtcgcctgggtaccagttttgtacggtggagtatttaatctctgcatcttcttgggcgaccagttcgacgaccgctgcatgaagttggttttcgtcgcgtattggggctgtgcagccttccagataggagacgtaggcttgttcttcgcacacgatcaaggtgcgttcaaattgtccggtgtggccggcattgatgcggaagtaggtgcttaattccatcgggcagcggacgccctttgggataaagacgaagctgccgtcagagaagactgccgagtttagtgcagcgaagtagttgtctcgaacgggtacgacgctacccagatactggcgtatcagatctgggtgttcttggatggcttcggagatcgagcagaaaatgatgcctttttcggctaattctttgcggaaggtggtgccgagtgatacggagtcaaataccgcatccactgcgacgccggccaatctggcacgttcgtgcagtggtacgccgagtttgtcgtaggtatccaatagttccttggggacttcgtcaagggaggcgtacttcggacctttgggggcggagtagtagctaagtgcttggaagtcgatcggtgcgatgtggagttttgcccattctggcattggcatgttcagccagtgacggtaggctgctagacgccattcggtcatccattctggctcgtgtttcttggccgatagggcgcggatgattatttcgttgagaccaggcggtagtgagtcggattcgatttcggtcacgaagccggcttcgtagcgcctgtccaggcgttcgagaatctcggcgttctgtggggtggcgatgtcagtagccatggctctgtcgtttgcttgtgtcaggtggttgtgatgctggcggcgatggtgcgcggctggctgtgagtagaaaaagcggggaggggagccagcatttgcgccagggtgatgctgcgtagtgcttgggcaatcagggtgttgatcagttgccagtttgagcggatgccgcactggtgggtgatactgcattggttgtggtcttggctgcattcggtgatggccaatggtccttcgatggcttcaacgatttggatcagggtgatctcccctggggggtgtgctagccgatagccgccgtaagcgccgcgccgtccttcgacgaggccagcttgcgatagcggtttgagaattttgcttacggtgggtggttccaaaccagagtgttcggcgagttcgttggcgctgagcaccgcgccggggtgtgcggctagtacggttagtacgacgcttgcgtaatcggtcagtttggtaacacgcagcatgtaatggtgtgtgaatgtttaaagcggacagaaattgtacgctttccagatgtacgcgccaatcgactttccgggtgcgttgtattgatgtgctttgggtgccagagttgctgtgttgatatatctaggctgcaatgctcactttttctaaaggcaggtattgatgtcccgtaggatcgtcgctcgcaagtcccgtatccacggcaacggtgtgtttgctgtggtgtcgatccatcagggtgagcgcattattgaatataaggggcgcatccgtacgcatgctgcggttgatgccaatagtcatggccacattgagagtggtcatacgtttctgtttacgttgaatgatgattatgtgattgatgccaatgatgctgggaacattgcgcgctggatcaatcatagttgttctccgaattgcgaggcagtggttgaggaggatacgggcgggaaccgacgtaaagacaagatatttatccaggcgatccgtgatatcgcttctggtgaggagctgacttataactatgggattgtgttggcggagcgccatacggcgcgactgaaaaaaatctgggcgtgtttatgcggttcggatcactgtactcatacgatgcttcagcccaagcgttgaagggtcaggaaggattaatgtggtcttaagggtggttgatgggtgtagttatcagtctacgtgatgtgtttattttgttttgaatacgtcatagctccatgtccgactcacacaggatgagggggcaggctggcggttttattgaagtcatcggttcacatgttatgagactaaaggtttgtgaggggtgtgtattgatagtttgaatcacactgaattggagcggccatcatggatgggtaggaggtgtgggggatgtgtgaattcggtgttatcggaatatatgtactcatttttccggtgattccacggggtgcgctccgggtgtggttgttgtgggaaattctatgcccgtattcaaggtattagggtatatatgtgcttctattgattatgaaacgggtgtattttcggccatttactgattggtattttggtgtatttagattttgcaatggagctgtgctgatgcgatgtgtacagtacaagtgatttaaatgctgtttcttttttatttgtctatttttcttgtatgcagtgagttcggtagaaaagattatgggattgagatttagtttgaatatctcatttaatcagtgctgcattctatggttgtttaattaattcggaaaagtgtgtttattaagagcgataccgttgcagtgtgcaatgtggttccggttcgttatcggaacgagcattgtttaattgaactagagtggctcgactgtttcctcttgcgtgaaagactgaaatccattgaaacttcagggatgacaatcaaacttcccttcttatttttcgccctgatgaacatgactgctgctgctgcaagtgctcctctccctcctgataccgctaagcatgcccatgcgatcaaagcgccgtttggcgcaatccgcaatgataattattactggttacgtgatgacacgcgtacgaacaaggcggtgctgagttatttgaacgctgaaaatgcgtatgccgacaaggtgttggaaccgctcaagccgttacaggagacgttgtataaggagattgttgctcgcatcaaaaaggatgatgccagtgtgccgtatcggaaacacggttggttttactattccaggttcgaatccggtaaggattatccgattcatgcgcgtcgcaaagatggttctgggcttgatgctgccgcgatcctggcggcgaatgcgtccggtgactttgttggtgaacaagtgttactggacgttaacgcattggctgcaggtaagagttacttcagtgtggctcatgctgaggtgagtcctaatacgcatctgttggcttgggccgaggacggtgtaggtcggcgtcagtacacggttcgcttcaaaaatctggagactggggtgctttatccggatgaaatccatggtgcgtcctctagcgtggtttgggctgacgataataagacgttgttctacattgagaatgatcctaaaacactgctgactaagcgtcttaaaaagcatgtgcttggtacccctgtcagtaccgatgtggtggtttatgaggagcacgacgatagtttctatatggacatcgaacgtacgcgtgatgagaaatacatcgtggtttctatggaaagcacggtttcttccgaaatgcgttatgcacctgtggatctgccgaaggggtttgtcgtgttggctcggcgtgagcgcgatgtgaaatatgggggagatcattttgacaggcgttgggtgatccgtacgaatgccgacggtgccaaaaattacaagttggtcactgcacccagtgatgcgactttgcgtagccagtggcgggactgggtcgtacacgatccagcagtctttattgaggattttgagctgttcgacggttttactgcgatccaagagcgttctcagggcttggagcgggtgcgtctgctcaaggctgatggccaacatactgatgtcgctgcggatgaaccggcgtactcaatgggtctttctgagaattccgagccggacaatctctggttgcgttatacctatacttcgttgacgactccggcgacgacgtatgagttcaacgtgcgtactggtgagcgtcgtcaactcaagcagcagcctgtgattggttacgatccgtcgcagtacgtgacggagcgtctgtgggtgactgcgcgggatggtgtgaaggtgccagtgtcgctggtgtatcgcaaaggttttaagaaagacggcactgccgcgctgtatcagtacgcgtatggcagttacggtttgtccacagatccagggtttaatttgccagtggtcagtttgcttgatcgtggtgttgtctacgcgattgcgcacatccgtggtggccaggagatggggaggcagtggtatgacgatggtaaattgctgcataagcaaaatacgtttaatgattttattgatgtgacgcgggcattggttgcgcaggggtatgccgccaaggggcgtgtggctgcggccggtggcagtgccggtggtttgttgatgggtgtggtggctaatcaggcgccgagtgattaccgtgtgatcgtggcgcaggtgccatttgttgatgtggtgacgacgatgttggacccgagtattccgttgaccaccaatgagtacgatgagtggggtaatcctgagcagaaggtttattacgattacatgctgacgtattcgccttatgacaacgtggtgcatcaggcttatccagcgttgtttgttggcacggggttatgggattcacaggtgcagtattgggagccggctaaatgggtggctaagctgcgtgatgagaatacgggggcgcttccaattgtattcagagtcaatatggatgccggtcatggtgggaagtctgggcgtttcaggcgttaccaggaattggctgagtcctatgctttcgtacttcaccatcttgaagtgaagtgaagtgggaggacgttgttgcatgttgtgatgctcggcgtctttcttcattgtatgctcgccgggttgcgcttggtttccgtagatatacttccatgatgagtagagtgcctattgttttttcccgttgtatcttggttggtgccgctctttttgtccttgtcgcatgtggtaacaagggggcgttggtgatgccgcagaaaccggttaatgtgccagagcaaccgttgtcgttgcctaaggccaaatctcaggacgacaagggagctagcccgccgacgactgcaaagcctgttcggtcccggtgatgcaagacgatgggggttgagagcgtgcgctgtcctttgcatttcaccaagatgcaaggggctggtaatgacttcgtcgttttggatttgcgtgatgggacgccgccgccggatgtggcgttggtcgcttggttggctgatcgccactttggtattgggtgtgatcaggtgatcgctattgagccgccgcgtggtgtcggggtgtttgccgcttaccgtatctggaatgcggatgggtctgcggcgcagcaatgtggtaatggtgcacgttgcgtcgctgcttggttggtgcgagatggttccgttgcggatgagcatttcttgattgacagtccggtacaggcgcatttggttcgctgcataggtaaagatgagtatgcggtggagatgggtctgccagtgttcgaacctgagcgtattcctctgtctggatttcctaatgcctgtggagagtatgtgttgtcgctacagggtgaggtgttgcgttgtggtgcggtatcaatggggaatccgcatgcagtagttgaggtcgatttgattgatgtggcaccggtcgaacggatcgggtcgctcttgcagcagcatgttgcgtttccggagtcagtgaatgtcggttttgtccaggtgattgatcctggtttggtacggttgcgtgtgtatgagcgtggtgctggagaaacgttggcgtgtggcagtggtgcttgtgcggcggcagttgtgctgatgcagcgtggcagggttggacgtgatgtgcgcgttgttctaccagggggcacgttgcgtgtgcagtggccagtttccggtgggccagtgacgttgtctggtccggcaaagtgtgtgtttgatggagtgtggtacggatgagtgaggtgaaagataagatctgtgcatacgacgtggctgcttggctgcgtcggcatcccacttttcttaaacagttccctgatttggcgttgacgttggtggtgcctcgtgaaaatgcctctacggcttcgttagccagttaccaactggaggtgttgcgtgagaagaaccgtgagttatcgcgccgacttgctgcattgacgggcaatgcacaggcgaatgagcagctggccatgcgtattcatcaattgactctgacgttgatgcgccagaggagtgctgcggatacgttacgggcattagtcgcttcgttagctgaggattttaatggtgattgtgtccgcttggtcttgctgcacccggttgcagggctgcaggcggcttggttgcaggtgattgagtccgatgatgtgcggcttgtgccgttccgtgattgcttgcgggatggtgagccgatttgtggtcggctcaacatcaataagcaggtgctgttgtatgccgaagaggccagccaggtgcaatccagtgcgttattgcccttgtcggggttggggttgatcgcaattggtagttacgaccccaatcgcttttatccggggatggggacgttgtttctacgtatgatggggcaggcgttgttcgatgcgctaaagcgtttcgatgtctgacatggctacggcagcgagagagtatgagtaggttggttgacgatttcttcgctttcttgcacgtggagcggggtatgtcagcgcataccttggatgcttaccggcgtgatatcggtgcgctcattgcttggggggtgcaacaggcagtgggtgaggttgttgcgctggatagggcgcagttgcaggctttcgttgctgctgagcaccgtcgtggtttgtcggccaagagtctgcagcggcgtttgtcggcgtgccgtggtttttatgcatggttagtgaaacgtggccacattgctatcaatccggctgctgggctgcgtgctccgaaggcgctgcgtaagctgccacgcatattggatgcggatgaagcggtctcttttgttcagatcccaacggatacgccgcttggattgcgtgatcgtgcgctattagagttgttttattcttctggcttgcgcttgagtgagttgtgcgggttgcgttgggggggggtggacctggatgctggtttggtgagcgtgttgggcaagggcagtcgtcagcgtgtggtgcctgtcggttcatatgcgttgtctgcgcttcgtgaatggtgtgctagtagtggcggtggagcgcaacagccggtgttccctggacgttacggtggaccgatttccgcgcgtgctgttcaggtgcggattaagcagttggctcagcgtcagggtatggccaagcacgtgcatccgcatatgttgcgccatagttttgccagtcatttgcttgagtcgtccggtgatttgcgtggtgtgcaggagttgttaggtcatgcggacatcacgacgacccagatctacactcatttggattttcagtacctttccaaggtttatgatgctgcgcacccgcgtgcgcggcgtaaggcgcgctgagtgtgtgggtgtgtgctgtatttcgtagacattatcaacagtgtgttgtatgggtaggtgaatcaatcagccctgaggggcatggatgaatgtcatgtggaatcagaggttcaatgcgcgtatgactggggtgtgctgggatatgtgtgatacaacctgagaaaggtcaagacattgggccaggtcgagtcggtaggtgattgggccaatcaggcggaatatttcaagagggctgtacccaggactcattaaaacgtgccagatgtggcggttggcatggttgagcatgacatttgggtatgtttggagtgcttttttctaaactaatgcattttgtgtggagcatttccaggcgttcaggtggttaagagttgggttgaatagtcgttaaaatgcctggatagaagttgcattttaccgtgatgcgttgatttcgctgccttcatggggtgtgcatggcggtgtggtaaagccgtgggacctttgtatgcaggcagtgtgttgggcacgggggagctgaagtgttgcagcagtgtggcttgaagcgccgttaggcatccccattttcaagaaaacctttggagactccatggaacccagtcagatgtctaatgtttttcatgcgacgacgatcgtttgtgtacgccgtggcgataaggttgccattgccggcgatggtcaagtgacgttgggtcacacggtgatgaagagtaatgcgcgtaaggtgcgtcgtttaggccgtgatggccaggtgttagccggttttgctggtgcagcggctgatgcgttcactttgtttgagttgtttgaggccaaactggagaaacatggtcagttgagccgtgccgcagtggaattggcgaaggactggcgtactgagcgccgtttaggaaagcttgaggcgctgttggtggtggccgataaggaaacttcgttggtgatcagtggtacgggcgatgtgatcgagccggaagatggcatcgttgcgattggctctggtggcagctacgctctttccgccgcgcgtgcgttgatggcacacactgcgttggatgcgaggacgatcgcgaccgaggcgattggcatcgctggcaatatttgtatctatacgaatcgtaacgtggtggttgacgagttataaggtaagggatgcttggctcttctactttgttattcagcatggctgcggccgcaatctagagtttatgtatgccttctaagactgatttcacttcctcaaccatgacgccacgcgagattgtgcaggagcttgatcgccatattgttggtcagcaggccgcgaagcggtcggtggcaattgcgctgcgtaatcgttggcgccgtatgcagttgcctgaggagttgcgtaatgaggtgatgcctaagaacattttgatgatcggtccgacgggcgtaggtaaaacggagattgcacgccgtttggcaactttggctaatgcgccgtttgtcaaagtcgaggcgacgcgtttcactgaggtgggctacgttggcaaggatgtggaacaaatcgggcgtgatttggttgataccgcagtcaaaatgtatcgtgagcaagctaaggtgcgtgtacgcactcaggctgaggagtacgctgaggagcgcattcttgacgtgttattgccgcgtcgtagcgttggtatcggttttgatgttgatgccgatgttatacgtcaagagccctctgcgcatgagagtgagaccagggcgaagttccgtcgtatgttgcgcagcggtgagttagaagagcgcgaaattgagttggacgttgctgtcaacgtgagtatggatattatgactcctcctggtatggaggaaatgggtcagcagttgcgtcagatgttctccaatattgggggaggcaagtctcagaagcgtaagctgacgatcaaggcggcgcgcccgttattaatcgaagaagaggcggctaagctggtcaacgaagacgaaatccgtgctgcagcgatcgaagcttgcgaacagaacgggatcgtctttattgatgagatcgataaggtcgttaaacgtggtgatactgttggcggtggtgatgtgagtcgcgaaggtgtgcagcgcgatttgctgccattggtagaagggtcgaatgtgtcgaccaagtacggcacgatcaggaccaaccacattttgttcattgcttccggggcctttcacctcaccaagccaagcgatttaattccagagttgcaaggtcgtttcccgattcgggtggagttggatgcactgagtaaagcggattttatccgtatcctgacagagccgaaggcggcgctcactaagcagtatcaggaattattgaaaacggaaggtgtatcgcttgattttacagaggatgcgattgaccgtattgccgagattgcttatttggtcaacgagcgtcaggagaatatcggtgcgcggcgtttgcacacggtgttggagcgattgttggaaatgctgagttatgagtctccggatcgtgatggcgagtccgtgacggtcgatgcggattatgtcaatgcgcacttgggggaattagtgaaggatccagatctgagccgttacattttgtaatgtgtaatgttggatgccttgtgtctttatgggggtgcaaggcatcgtgcgatcttcattgtttgccagcgaggcgtatcgttattctgcagtgctctctatctggtagagcacgatgctgttaaccattgtcatcaatggcactatccatgtacatgcaagcgttattcaaagcccgaggtcgtcgtcgtcgcatcgggttggtggtggggtcatcagtacagtggtgtaccagcatggtaggccgtgacaaagccccgccaatccagcatgacttgtgtagcgtagttaaatgcgaactgtcgcagttctttctctaactgttttttatgactgatggtgttgtggatttgcttgtcgatgttgtatccgaccacactcagatcattatcttggttggccagtgcatgtgctgaggccagcgcttgacctagatagagggcggcggtggtcatttttccggctgtattgagcgtttctggcgctagatcttcctggtacggtgatttctcatgtatgtagtattgtgtgttaccgatgctggtatagccaatgagcacatcagcatgcagtagctgtgcttgggctgtgcgtgctacgcgcgctccctcgtggttgtggtagatggaggcgggcatctgtgttggtgcagcaatggcaaccgcactgcggctttcctgcttccattctaggatgacgtcgtcgtcagtggcggtgcttggaccttcgatgagtacgtatagacggcgcttgcctaggctgcttgtgcccgatccgagtttctggcgcacatctttgatcgtgtagtaattggcaggatagcgcttggatggagaaatcgaggctaggtaactgcccattgctgcagctacgccactatgggtcttttcatctacgccgacaaggttaggcaaattcaacaggacacgtttgttaccgttgagtgttgtgtatttggcgaggaattgcatgtgcgatttggcattggcggctttgattgttttcgcgacgataccgcttgtattgttggcgtcgaggatgaaatatttttccgtgttgcctttactgaattttgacattttttttaggtatgcctgcaccattattttgatcgctttttcgatgtcggcatcgttcagtccgttgtcacggccaacaagaaccatgctgacggcgagtcgacgtaaatcccagatgtactggccgaggtggccttcgtcgaagtcagcgatcttgaacacaacgtttcctttgctattgcgtgctgcatcgaagttgcctaggtgggcgtcgccgttgagccatgtgaagcctgttttgggagtgctccattgcgaggatggccacgttttcatgtcttggtagaagatgtgggcagtgccacgatagaaaacgtatggactctcagtcatctttgccattttgctgtctaattcggctttcgaggtggcgtaggggtggttatagttgcgaatttgtgtaatcacccagggcgcgcgttcggtcgttaccattgtgtggctgatgatgggaaggtcagtgagtagaaggttgcctagatggggcagcatcgtgagcatcctcggatgaggtgaggagggtatcaatctatatacatctgtacgatcatccagtctatgcaatcatccagtgaatcgtgcattgtggtgctagggtattaaccgattgctctgtttgagggctgtatttgttttgagttcatgtggaagttgtggctgtagcaagtagctcaccattaggtgtcgtcttggtttcgatgggtttgatgtggatttgactgtatctggaagtttggaacactaaattaatatatggccttctcaggcttatgatggcggtgcaataatcgcggccaatatgagtgaatcttccgagaaaaccggcacgacccatttcggcttccgccaggttgcggccaaggacaagaagacgctggttgccgaggtgtttacttcggtctcacgtcgctatgacttgatgaacgatctgatgagcctgggtattcatcgggcctggaagcgttacttcgtcgctactgctcaggtgaagtcaggtgaccgtgtgcttgaccttgcaggtggcaccggcgatatcgcaatgctattgaagaatcgggttggtgcagaggggagtatcgtacttggcgatatcaatgccagcatgctgtccgttgggcgggatagactgattgatcgtggcgtggtggctcatctggactatgtgcaatgcaacgctgaagcgctgccgtttcaggataagtgcttcgacttggtgacgatgtcttttggtttgcgcaatgtgaccgacaaagatacagcgctgtgcgagatgttccgtgtgctgaaggtgggtggccaggcaagggtactggaattctccacggtaactgccgagtggtttaagccaatttatgatttccactccttccaggtgttaccgcgtctggggcggttgtttgccagggatgctgctagctatcgttaccttgctgagagcattcggaagcatccaccgcaggaagagttgcaggcgatgatgggggcggctgggtttgagcgttgtcgctataggaatttgaccggtggcattgttgcgattcattccggatataagtattgatgttgcctcgtgatgctcattggcgcgagatgaatctaggatgcgtggcgaatgcagatcgttgatgtagatgggggtgaggcggaaaattgcgcttgagtgaagcgcatcatctgtttttggattccagatcctgagtgagtgcagctagtgggggcaagcagtgcgcgtttcccttttgtgatgcgctgttttatttgttgtgaatgcgcgcgaattacacctctggagtagaatcgccggtgttccctgtatcggtgttgttcatgtgtcttttgatcccgcgcctttttgggcttgcagcaatcgttatggtgggttgctcgaatcagcccgcgtctatggtgccgtctccgatgtcggcacatgtcgttgctgttgggaaagccgatactcgccgtcatgatgaaagttcttatgctgaatcagataaggtcgtcattaagcatttggcattggaccttaagttggattttgataagaagacgctggctggtaccgcggcctattcccttgactggaaggacaaggatgcgaagcaaatcgtgcttgatacccgtgagctgagcatcgagaagattgaagctgacgacggccaagggcacctgaatcagcttaagtttgctttattcccagccgacaaaatattgggtagcaaactggttattgagacccccgcgcagcctacccagatccgtgtcacttaccggactgctccgagcgcctctggcttgcaatggatggagccggcgatgacggagggcaaacgcttgccttttatgttcagtcaatctcaagcgatccatgcccgcagttgggtaccgctccaggacaccccaggtgtacgttttacctacacggcccacatcgtttcacgtccagatgtgatggtgttgatgagtgccgacaacgaccccaacgcagtacgcgatggcgattaccgcttcaaaatggctgaaccgatcccctcttatctgttggcgatcgctgcaggtgatttggtcttcaagcccatttctgcgcgttctggtgtttgggccgagccgatgatggtggataaggcggcaaaggagtttgaggataccgaaaaaatgatcggtaccgccgagacgctatacggtcagtatcgttggggacgttacgacatgttggtattgccgtcgtcgtttccatttggtgggatggagaatccgcgtctgacctttgtcactccaacggtgattgtgggtgacaaatccctggtttcgttgattgcacatgagttggcgcacagttggtctggcaacttggtgactaatgcttcgtggaaggatatttggctcaatgaaggtttcacgacctatgtgcaagcgcgcattactgaggcgctgtacggtcagacgatggccgacatggagcgtcaagtcgatcaaatggatatttttgcagcgttgaaggatattcccaaagccgatcaaacattggtgttgtcgacattgaccaagcgtgatccggatgatgcactgagtcctatcgcttatgtgaaaggggcatggttcctacagtttcttgagcaacgtgttgggcgtgaggtgttcgatccgtttctacgtggttggtttgacagccatgcgtttcaaagtgcgacaagcgaagattttgttgtttatctgaagcagcatttgttatccaaagatcccaatgcgattactgccgaggaattgtatagttggctgaacgcgcctggtattccgacaattgctcagaaggtgcgttcgctgagtttcgccaatgtggatggtgcacgtattgcctggagtggtagtggtctcttaccgaatagtcaggtgactgatggttggggtacccagcagtgggtctattttcttagcagaatgggtgagacgctcaagcttgagcaactcaagcagcttgaccaagcctaccacttcaccggtacgccaaatggcgagattgcgatgcgttggtatccattggcgatccgtagtggttataccgctgcgtggccggaggcgggtgccttcatagggcgtgtgggtcgactcaagctgatcttaccgatttacgctgagttgtcgaaaacaccaaagggattactttttgctaaacaaatttttgcaaaatttaaatctcgttatcatccaatcaccatcgtatcggtggagagtgtgttggtgagagagcaagttgcacaggcagcgaaagcttctaagggaggctgagtggttgtccaacaatagaatgtggtttggggagggatgtattgtttgctgtctttagattgtttcagatttgaatgtcgtgttgatcttaattcgatttttttttaatgtgctcagcattgaaaataatatcgatgtaatgttttttggatatggttttgtgtatgtcaggttgaatgtctgtaaaaaataaaatttaggcaggaagactgactacgtatgtcgcttggttagaaggtatatagaaatggatgtggatttactcctatctcactggtttattgcaatgcgatgcgcatattgttgccattgcgaggtgagtcaagtcattttccaccgatgaccttttaggatgccaagctgctttttgtaattttcctataaagggatgatatttattttttagaaatgatgcttgattccgtgagccattctaaagtttctggactatttaaacggaatctcatcttcacctgctctaaagagttgctttggaacggcctgttttaaaaccgattggatcatgaatgaagagacggatgtgatgtggatgacgaggatgaacacagttttgttaggttcggtattaagaatctttcttatcgcatttatgattctcatcgctgcttgtcaagtatcgttaccagattcggtgatgcctcgtcccgtggatactacgatgcataagctttcagtggctgatccgactcaaccagtgacttctggaaatacaccgacggcagcggacatcgctgcggttgcggccctgaatgctgagtttgatccgggccgtgatccagtcgcagatttggcgacagcgaaggttgaagcgaaacgtggtggtaagcagatcatattgagtattgggagcaagaggtgttcctggtgccgtgttctggatgagtttattaatggtgattctgagatacgaagtttccgtgacgctcattttatttggatgaaggttaatgttagcgatgaaaataaaaatgaggtgtttctggcgcgtttcccgaaagtgaagaattaccctcacttgttcgtgcttgatgccgatgccaaattactgaattcccggtttactgctgattttgagaaaggtcacagttacgatcgtaggaaattttttgcgttcttgcgccaatccgtgccttcaaagaattgagaggcaccctccatcttttcagattcttttacaaacccatccacctgtggtgggacctgaaagatacagccaaatccaatcttatcaagaaattatgtgtgatgagggtgtatgagtacttttttgcgttgttgaaaagattcagcgattgctggttgcaatggtatgtttcagatcaatttcaagtgaattggaaatttgtgtaaatatcagtttcagttttcataaatgactggatatttatcactgagaaaatgatgagatgttattaaattctagtcttttaatatcattcgcggtaacccttcttttatcagccgatcaatcagatgatctagcagttggcgctccttttcggaaagaaccgacatgagtctgtttttcatgtcattaatcaatggcgctacagtttcatagacttggtggccaatgggagagagagtcagcatcgaacgacgtcggtcatccccatgagtttcacgttggatgaagtggtgcttcagtaggcgcgctactgcgcggcttactgccactttgtccattgcgctgtgctcagagactttacttgctgaagaaccaggatacagtgccaagatcgtaatgacgtgccattctgtggcagccatgttgtatcggtgctcgtaaattttggcaatgttatcgttgatgtgtttggatagcaggctgatgcggaacggcaagaattgttccaggttgatatggatcgtatgagatgcggtattgggttcgctcatgctgcgttaggccttgattccaatttcatatgaaaccacaaatcttcgattatcttcgaattgttgtgagttcgatctcgtgatacctgttttttcatttattccgatgggtgcggcttggtggtgtacctaacgttgctgcacgttgcaactcttattacttattaatccaagcatgcggcaagcgaatcaccacactttttagacaattcagacggttcgaggagatgggtggatgttcaaccactggctttgcagccattggaaggcgtacgtgattgcttttagatgggattgcttcggtttgcagcgcgagaatgcagtagcacgattactagcgattggtgtccctatagtatctgcaagtgctcaattccatcttgcatgctgctgagcagagctgtaaatagtgtggcctgtccatgtgcttcgacaattggtgcacagtatgtaccgatggatgaagctgggtatggatgagtgaaagcgatctggatttttttgggggggcactggttactggatatgcgatatgttgtacacagaaggatatttaatcccatatatccttccgaaggtattagttttcaggtcttttttatgaatagatagtgtatcgatttaactccaattttttacatattttcagtttcaattgatcttaactactaaaaatatgatgtttgtcgagatcgttccaatttaattttatttctttatgtaatatctaagaaggaaagtgttgaagtaactgtctttcctgatgtatatcatcagaataaattgaaaattgacttcagtcacttttttgtgtatgagccattttataaatggttataatattgtttgacagcttataacgtataattcatgctttattgaaagcttaagtagtgctctattagtggcattattttgttgcggtagctggctggaatgcttcgtttagtttttttccaaatttttcatagacgatgtcatatttctgtttaggtatatcaatctctgttttgccgtgtctccaaacagctaaaataatgttggattgatgatcggatttaattgctgttcggacgcttaagagtaatgctggactgaaagaaggggcacagtggtagtgcaactgtagagattcatgttgcgagtggtttcttgggccaacgggcgggttttactttatgttggcggacattcaccacgtgtggtggctgtatggaggagggtcttctggaattgatcgtagcaggtactttctttattaaggtggggcattaagaggagccataatttcctacagtccattgcaaggtggttaacgttagtttggttgaattgatgactcgtactaaaacgaggagactggttggaagtgtcgtaaggtgaaacataattaccattgtagtaggctttgttgaacagagaatctctcaacttaaagcaatatagcttcaggaaagttggggcggttaactttgtatctatgggtatggttcaaaattggggctctttatcaacaaatagagtattgcttgatatccacaaacagttaacaatgtatacttagaagtatccgttatacatcctccatataaagatagaatttcatgattgacaacaatgttttgaatctggatgccattgctgaagccaaggtgaaattgacagaagaactgcgcaggcttgaggaacaggaagtgcagttactccagcagcaagcagctgaaatgtttacccgtgtgattgctcttttgaatgattttggtaagcacttcaatggcaagcaaaaagcagaaattgctgctttaatcatggtaaatgatgaaaagcctaaggctaggaaggctttgtctgctgacgcgcgtcgtgtggttgtgcctaaatattgcttaccccacagtggtgaaacttggactggtcgcgggcgtctcccaagttcatttgctgcatgggaaggtaccgctgcgtacaaggaatggaaatccaatcatccgaatgagaggtttccagcatttcagggttgaaacaggctttatataataagctttgcaaagaagatatatctaggtactgatggaacctgtaagcgctggatagttttttcattttttatgattgccgtcgttttatggtgtgagttggtgcccttaaagggtttttaaatgttttttaaagaatgacttatatgaggtgtcatcaatctagcctggaaatggtaactattttctatattgttctgtaaacgctataggtattcttatcttcgcttgtggcaatctcgtgctgtagacgtgattggtggtcatctttgcagcactatatattttttattttccagttagatcggaggcttctgcttaggcgtgaaatgggttttgataggtgctcaggttatcgatcatgctatgaattctactgctcagactgtcatcaatgtgttcgatagtttcttgaggtttcatatatttctcttcattattttttgtgaatgtttgaatctatgttgcctctttttttctggtagggcttcttttctggtatggcgcgaaatgtatataccgaccctcacaatcagctttttatgaacattattacaagatgatgtcatagggagtgtggcatatcatctttttgcaaatgttttgatcttgaaaaacgtttttcttataaggatttttcattttttatgaatgaatattaaataaatctataatattgaatttatagcaagggtgaacgatgtattatacgggaaatttaatgaggttgagtgtatgttctattattttatactcttccttgacattgagtgttttgatgtttctggccatgaaatgaattgatttggttcttgttgcaataaggaagcatcgtaatgagtggtgtgcgcgctgttggggggtgtagttgccaattgctttatctaacgctttgggtcaataaggtcctgtcaggtgtttttgtttcagtcccgatatccattttattgcttgtgtttgcatggtctagaatcattgccgttgttttagctggtatgaccttaatgctgtgcgacttgtattcgacctcaggatcattacctgttttaaggtgcaagcagaatcaagtttatgaggtttctatgccttgactattcccgctgcattccatgtgcaacgggtgtaagcgaaaaggccagtttggttgttcagctaattgcctaattgatttgtttgactttcttgatgcacgtttccgtgcgtttggagtttttattgttgaaagtcagtattactcatcttaaccatacgcatagtcgtttaacgtatcagtttcaatgcgtttggatgcgttcattgcttagatctactagatggccacgcaccatgtcgacgttgtgtgtggatgggtagagctgcaggtagcgcgtcaagtcgttccgtgcaccgctgcgatgtccaagttgcagatatgctaagccgcggtcgcggagtgcttcaggttggttcggcaccagtttgaggatgcgatcagcgcagcgtgctgcgcgatcccagcggttagtgttagcgtacacactgtgtaggttgcgtaggatacgaacgaggattgtgcggtgtggtgcgggattgaggatttgagctaatgcgcgatcatctggcacttcaccacctagatgtgggcggacacgctcccgtaactcttctgcgtctaatggtcggccgccgttgaatggatccatgacgagtatgccgtcgtcgacaggcagccggaccaagaaatgcccaggaaatgatacaccgtctagaggaattccaaggcgtcgtgctacctctatttgtatgactgccagggagattggattgccaagacggcgctcaaatacctgattgaggtagctgttgcgtggatcgtaatattcgtcgtggtttcctgaatatcctaatttttggaacaagtaacggtttactgcggccatcttcagtggccacagagaaatctcttccacttctgagcggaggtattcgacatagctttgtaccagcgtgtcgtagaggttagcgtccaggtctggatattcgtcacgagcgatcagtaacgctgtcgacatcaatggcagcgtttcatcgtcgacagtggcgaggctgttccagaggggtagtagcagttgttcgaccatgaaacacagggtggtgccaagtgtctctttattcaagcccaacgttttctgaaaggggcctgccgatctatggccaatggcaaaaccgattaatcagagtttgggaatgcctggtccgaataccagttgggtaccatctttcagatcaaggcgtgcagcctggccagcgtttagttccagtacgtagcgtaccggtgcattacttgggtagggtgggcacgcttcacctgctgggcacggcggcacgttacgttgctggcttaccagttttccttgttcatcgaaatacaagatgtccaacgcgatcttggtatttttcatccaatatgcttgaggttcttgacggtcgtggatgaacaacatgccgtgatctgctgccatttttgttcgaaacatcagcccgagcgcgcggctttcttcagtttgtgctagctccacctggtagcgttgaccaccgagattgacccagtgtccatctgctctggcgtaactgctaagtagcaatagggagagaacggtcagcgtacggaatacagacatagcaatgctgtcgattgaggacgaaccctagaagggtagcgtattttctgttgcgtcgagtgagtattggtgctcagccttcgctttgaaggggggaattcttgcttcttgtttgaggtgggaatccaggttcttacgtacattggtagcttaaaagagttgttgtggcgacctgttttagggtgtgagtagagcgaccttcttcatggtccttttttcaaaaatagattgagtccctttaggggacgttgataggcaggctctacaacgttttctggcgtgttcttagctacgataggcgtgttatgtattggcagattgtcgtgactgttatctgtatctcaagatttaaggtcagggtttttggggtgttatggctgctgagagtttgtctgttttgacacaccgcgatgaacccaaattttcatctgtcactagactgctaacgtacgttgttagtgattgattttttattgttatccctgttcggatctggttggagcatctctttcatgccgtcattccgctgctttttctcggtgtcgctgtttagtcttattttatgtagtgtcgttttcggcgttcatgccactgctgttactaccagtacggatcattctctaccgttgagcctcggtaaaattcaagttgaggggactcatgacggtgccacgttagtggatagcaagcttggttctgtcgatgtcctgagcgatgacctgctgcaaggccagcatgtcgattacacctgggaagtattcatgcgcgcaccgggtgtgcaggtgacgcagtttaaaatgggtaccgagtctggtcgtatctccttcaggggattcaatggcgaaggccgtattaacgcgattaaattgctcattgatggtatccccagtaacgacaatgcgggggggatgccttaccttgatgcgatctctcctttggggatgagcgcgattgagattgtgcgtggtacgaatgatccgcgctatggcctcaacgcgatcgcaggccatgtcgacgtgattacccgcagtggtggcaacgatggtttgctcagtgtgactaccggtgacttcggcactcgcaagattcagtgggtcaaaggcattgagcgtggcgcgtggagtcagaactacgttgtaagttggcttgattcggatggataccgggatcatgcgcgtgcaatcaaacgtgctgtctctggcaaatggggatatgccgatcctagagatgcgtggcgtgctggtttgagtgtgcgctactttcataatgatgctcaggagcccggatacctgacttatgatgctgctgtcgccgatccgcgcagttcgccagcgtattctggacaggaccacagccaacgccaaaccgtacagactgctttgcacttggatgggaggatgagtgaagcattccattggactgctaaggcgtatatcaaccgctataccaatgatcgtgtggtgaagttcactgctgccagcgcacgtcaggagcgctacaccgatgaaacccatcgtggcgtgttgaccaatgcgatctggcgaccttcggtggattgggtgcatgaattttcccttgaaggcggtgttgatgcgcaatggcagagcaacgtgtcacgtcgctatcgcatgttggatggtcagcgcggcacggtgctgcgtgactgggatttcaatctggatacgtacggcgcttatttacaagcggtgatccgtgtcaacgattccctgaagttggttccagcctaccgtgtcgatcgtattgatggtcggtttagtgacatcgctagtgggctgcgctatccggtgtaccgatacggcacgatccaacagccgaagttcagtgtgtcttatgacgtgagtcaggatgtgactgtctatgccaactgggggcgtactttccagattggtagtggtaatggtgcctatcgcactcaagctgatgatctggtgccgtcgatgaatgatggttgggaaacgggattgactttcaagccgtggtcttgggctaatgcgcgcttggtgtactggcagcagcgtgcttctggtgaggtggccactctcttcggtacgaatggcgctattgccattaacgaggttggtaatgttggcaagacgttacgcaacggctgggatgcgcagctgaacttgcagccggacgagcagtggcgtgtatggctggcctattcccgtcagaaagctgagattgctattccagatccgagtgtgcctgccacgcgtggtaaacagatcgagaatgtgccgcgttggcttaccaatgttggagcggagtggcaggtgttacccaagcttaagctcagtgcttgggggaatggtcagggaaactattatgttgagcgcactaacacactggggcgttatggccgttattttcttagcaatcttagtgccacttggttgctttcgaacaagagtgaattgacattgcaactgaataatgtgaccaatcgtttctacgtctatgcctggtatgacagcggtctttccggctattcacctggtgacggccgtgcactttatctgacctggaatctgaccttttgataacggtcgttgctgagggcgacgctgaagatcgacattttttatgcaagtttaagtgtgttgatagcacctgttctggaatgtggcgcatggagtgattgcaggtaatggaccattgttactgatgctctcacgcgcattcagtattgagaatgcgattgcaatacatgagtgacgcaataaggctcaaggtctatgtgtgtatctcctccagagtgttgtagcggtatgtacacctgccttagatgttctcgtgaatcccgcattcacgtttgaatccgaagaagcgtgtgtcttcttcgcgcatgcctggttccaaggggcgtgtcgtgtgaatgtcgccgattgaaacgtagccctgttcccaaagcgggtgatagggcagatcatggtgtttcatgtattcccagatatcgcggtcggtccagtctgcaattgggctgattttgtaccgctcgtcacgctgttgcacgattgatgtttgggtacgggtactggattgtccgcgacgtaggccggtaaaccaggtgccgacttgcaattcctctaatgccctgcgcatcggttcgaccttgtgcagggtgttgtattgattaattccgtcgatcccttgttcccatagtcgaccatgacgggcttccgtccaagcgccgctacgcagcggctggtataccttcagattgagcttgagtcgttcggtcagcgtgtcggcgaaacggtaggtttctgggaaaagatagccggtgtcgaccaggatcaccggaatatccggtgcaaaccgggtgagtagatgcagcatgacggccgattgcgcgccgaagctggaagacagtgcagggtggtcaggaccgcgctccagtgcccagcacacgcgattttcagcactcagcgtttctaggtggacgttgagcgtttccagatcgtccagaggaggtaaggcgggaagtacggtcatgcttgcagcgttgaggaaatcacgtgtcggtgggtggggtatgggggaagtgcgatgatgccggtgcgatgtagaaaatcgccaaagccttcgcccggaaggcgtttctgttgatagcggcccagcaatggttctagtgccgcaaggatttcagtttcggtgatgttttcccgatacagcgtgttgaggcgctggccgcgttgatcgcctccgagcatgaggttatagcgtccaggggctttaccgaccaacgcaatttcggcgagataggggcgggagcagccgtttggacacccggaaatgcgcagcagaatgggtttctcagcaagtccatatttttccaggatgggctgtagcttcacgttgaagtccggcagataacgttccgcttcggccatcgctagaccgcaggtcgggagtgcgacacacgccatggcgtgacgtgcgagggctgtgggcgcacggttgccggtatccagaccgtactgggtgaccagtgcgtcgattgtggcgcgctgtccgggagagatgccagcaatcacgacattctgattcggtgtcatccggaattggccgatgccgagttgcgcgattgctcggaagccactcagcagggggctgctttcggtatcggcgatgcgtccggctggtagcgataaggtcagatgccagtgcctgtcctcaccttcaatccacccgtaacggtccccattgtgttcgaatacaaacggtcgtgctggttgcagtgtgatgccggcacgctgctggatctcgccgacgatgcaatctagaccgcggtcatcaatggtgtatttgaagcgggcgcgcttgcgtagcgttcgattgccgaagtcgcgttgtgtggtcacgatggccgtgctgattgcgatcagatccgcgcgggtgatgaagccgatgatgttgccgacgcgaggccacgtgtcggggtcaccatgcgttgtccccattccgccgccgatagcgacgttatagccaagcaaagtgttgtcaacgataactgcgataaaccccaggtcgttggcgaatacatcgacatcgttgattggtggtgcggcaaaaccgattttgaatttacgcggtagatagtgcgggccgtagattggttcctcttcctcaccggcaccagcgacctttttttcatccagccaaatttcgtagtaagcgcgtgtgttgggtagcagatgctcagacaggtgcgctgcgtcggtataaaggtctgcatgggcacgcgagagcaatggattggcagcgacctgtacgttgcgattgacatcgccgcaggccgcaagtgtatcgatcaatgccgcgttgattgcctgcattgttgctttcaattcgcgtttgatgactccgtggaactggaatgcctgacgtgttgtgacgcgcaatgagtggttggcgtagcgcgtggcgatggcatccaactgcagccattgctgcggcgtgatgacgccgccaggtgtccgggtgcggatcatgaattggtaagcaggttcgagtttttgccgacggcgctcctcacgtagatcgcgatcatcctgctggtagctgccgtggtacttaatcagcgtttggtcgctttcgtggagcgcgccggtggttgggtttgcgagactctccaacagggacccccgcaggcggtggctcttgcccttgatgtcttcaatggaggaggaactcatgggtgcaggcgatcccggatggaggaggatggacaaggatgtttggggcgacatggtcgccatgtgtcgttgggatcgtagtgatgcatggccacgatccgagtcaggctgttgttgcggttgttaatacacatcacgtgcatagcgtccttcgcgttgcattccaatcaacgtctctgcggcggcttctttggtgaggttgccatgtgtgacgaggatttgtagcagtgttgtatggatgtctttactcatgctgattgcgccgcagacatacagagatgcgccattttggagccaggtgtacacctcttgcccctgtgctagtaagcggtgctgcacgtagattttttcagcctggtcacgggagaatgcaagatccaatgcgtgcagttcaccgcgttgtaaggcttgttgccattcggtctgatacagaaagtcgcaattgaagtgttgtgcgccgaagaacaaccagttacgcccggttgcgccactttctgcgcgttcttggacgaaagcgcggaatggtgctactccagttccagggccaatcatgatgatgtcgcgcgttgcatccgccggtaaacggaagcgctcattgggttggatgtagacagggagggtatctccttctgtcaaaccagccaggaagttgcttgctgcaccaatgtgttcgtggccgtgggcttgatagtgcagttcatcaatcgtgatgtggacttcctcgccgacacgcttgcggctggaagcaatcgaatacagccgtggtgtgagggggcgtaatgctgcaatcagtgcggtatggtcccaatccgccggccagcgtcgcaatacgtcgatcagttgatgatcgttgagtagcgtcgctagtccggcagtctgggttggggtgagtagcgcgcgcagttcctcagcaccggatcgttcggcatgcgcagccaagaatggccgcgacagcctggtcacttcgcgttgggtggcgagccactcggacagcggcaaggtttgcttatcttgtgttacttcggtgtgagctgaaagtttaagtgttgtaaggacagcatctacaagcgtattgggattacggtgatgtacgcccagtgcgtcgcctggttcgtagtgtaatccgctgccttccagcgacagctctaggtggcggacccgtttcgaggcctggccatgtgttcggaacgtctggcctttaaagtcacgtccgctgattagttggtttttgaacagttcagcttggaacgtctgactgggtccccggagagctgaattgccgcgtaacggtgtgacattggtgagtggggcagtggtgtctttaagctgctcgcgggcatggtgcagcacttgtttcagccatggtgtggcgactgtatcaatatccacatcggcttcgcctaatggttgcagccgttgcgcaccgagtgcttgcaatcgtgtgtccagacggcgggcgatgccgcagaagtcagcgtaactggagtctccaaggccaaggacggcgtatttcagtttgggtaatttgggtgcgcgtggctcattcagaaattccacaaagccgatggaatcatctggtggatcaccttctccctgagtactgatgacgatgtacagcagccgttctgcagccagttcgcggggggggtagcgatcggccctaactaggcgtattgccagtcctgcggcttcggcttcggcggcgagttgttcagcaatgcgctgtgcgttgccggtctggctgccgtagagcacggtgaggcgttgtttggcttgggtccctgaatcttcttctggtacggctgttaatgtggatgtgagttggctttgtgccagtccagcgacatagccggatagccaccatagggacggtgtgtccaggcccttgacgagatccatgagcagggagcgacggtcctcggggagggggcttgcggtaagggaataggtgggggcagtcatgcctgtgatgagccggagcaagcgaatagatgttagggaggtgcgaaatggtgcggaaaggaaggaaggttatccccttatgcttcgtgcttatttcagaacatgattaatttcgctacacactgcgcatgttttcggttggctacggtgtccgccgatgtgtacatcactccaattctctgagttgctacctctgatggattcatcctctttctctttttctcatcttgatcggcttgaggctgaaagtatccacatcttgcgtgaggtcgtggcggaattccgtaatccggtgttgctttactctgtgggtaaggatagttcagtactgttgcacctgttacttaaggcgttttcgccggcaccaccaccgattccgctgctgcatgtcgatacacgttggaagtttcgcgagatgatcacctttcgtgatcgtcgtgttgctgagacgggggtacagttgcgtgtccacatcaatcctgagggtgtggcgcaggagattaatccgattacccacggtgccgctgtgcatacggacgtgatgaaaacgcaggggttgcggcaggcgttggagcaggggcagtttgatgcggcgattggtggagcgcgccgcgatgaagaaaagtcgcgtgccaaggagcgtgtattctcgtttcgtaacgcgcatcatcgatgggatccaaaaaaccaacgtcctgaattgtggaatgtgtacaacgcacgtattcatcctggagagagcgtgcgggtatttccactgtctaattggactgaattggatgtgtggttgtacatctatcgtgagaagattccggtggtgccgttatattttgctgcgccgcgcccagtggttgagcgcgacggtatgttgattctggttgacgatgagcgtttgcccctgcgtccgggcgaagtgtcgaagttgctttgggtgcgcttccgtaccttgggttgctatcccctgactggggcggttgagtctcgtgctgcgactttagaagacatcattgctgagatgctgttgactcccttttcggagcgtcaggggcgactgatcgattatgtccctggtgcctcaatggaaagcaaaaagatagaggggtatttctgatgattgctcggatggtgaacgtgaaacgcgcgtttgactggtcagaggcaagcacaagtgtggatgcgttgccggttcctgagactgtcacctatagcgacaacaaacggatgcagtctgtgattgccgacttgaagcagcaggagataaagcctctgctacgcttcatcacatgtggcagtgtcgatgacggtaaaagcacgctgattgggcatctgctgtatgacagtcagtgcttggctgaagatcagttggctgatcttatggtggatagtcagcgttacgggactcagggcgagcatattgattatgcattgttgttggatggtttggccgcagaacgtgagcagggtattacgatcgatgtggcttaccgttactttgatactgagaaacgtaaatttatcgttgccgattgtcctggacatgcgcaatacacgcggaacatggccaccggtgcctctacggcggatgcagcggtggtgctggtcgatgcgcgtaaagggttgctgacccaaacgcgcaggcatagttatatcgttgcgttgttggggatccgccatgtggtgctagcggtgaataagatggacttggttggctacgatcaggagacatttgaagcgattgcctccgattacctggcgctggctgccaaactgggcatcaatcaggtgcagtgtattccgctgtcggcattggaaggcgataatctttccaagcgttcggcaaggatgccgtggtatgtcggccccagtctgcttgagtatctggaagcgttggagccagctgatgtcgatctcgcggctgcaatgtgcttgccggtgcagtgggtcaatcgtcctgattcgcagttccgcggtttcacggggacgttggccgccggtcgcgtgcggcctggagatgctgtcgtggtgttgccttcgggctgtgtttcacgtgtggtacgtgtcttcaatggtgatactgaggtacacgaagctgttgccggccaggcggtgaccttgaccctggccgatgagattgacatcagtcgcggcgatgtcattgccgctcttgatgatccccccgaggttgccgatcaagtcacagcttacgtgttgtggatggacgatactgcgttgttgcctggccgacgttattggttaaagttgggcgcgcggatggtcgctgccagcgtcagtgacatcaagcaccgggttgatgtcaatacacaggaacagcgagtagcgcagcgtttacagctgaatgaggtgggttactgccaactgtcgctagatgcgcctgtggcgtttgtaccgtatgcgcgcaaccgtgtgttgggcagttttattctcattgaccgtcactccaatgctaccgttggtgccgggacgttggattctggggtgcatcgtgccagcaatgtgcattggcagcctctggatattgatcatgtcgctcgtgccaggatcaaggggcagacacccaaggtactgtggttcaccggtctatccggtgctggtaaatctgcaattgcaaacattgtggacaagcgtttgcatgccttgggttaccacacgtttattttggatggtgataacgtgcgccacggtttaaatcgtgatttgagtttcacggtagaagatagggttgagaacattcgccgtgttgccgaagtcgccagactgatggttgatgctggtttggtggtgctggtgagttttatttctccgttccgggatgaacggcagttggcccgcgagcgcttcgccgctaatgagtttgtagaagtgtttgttgatgtgcctttggcggtggctgaggcgcgcgatgtgaagggcttgtatgcgaaagcccgtgcgggcttgatcaccgattttacggggattgattccccttatgagccgccgccgcacccagaactgcatctgcgtgccgaccaaggaacgcctgaacaactggcatctcaggtgttgtcgtttctaggggtggaagcgaactgattggggcctgtgttgcagcaggctgtttggttcacttgggtgatgtgacctgccaacagaaaaccgcacattgtgcggtttcgggatctgagatgccttttcggacaggtcaatcgtcgcttttagacatatcttcgtcagcgacgacttcagcggcggcccactccatagcttcacgttcagttcgctcgcgttctgccttctcgatctcgtcgatcatcttactatcgatcttgcgtgcagcaatttcacgtaatgccagtacggtgggcttatcttcgctattggtattttcaatgagcggcggtacaccgttagcgagctgacgggcacgtttggatgccatcatgaccagttcgaaacggttgttaacaacttccaggcaatcctcaacagtgatacgtgccatgggactccactccagaataaccgcgtaaacgggtgattgtaggccgcactccaagcagtagcaagatgcatctatttaatctttccgtaaatgatctacgcgtcgcagcagcagcgcagcgtctgtgctgatgtgccgtcctgcttccgtagatttttcttgctgatgaatcccaatgaggctttaccagtatgcaggccacatgcacgttaaggaaaaaccccaacatatcttatggagttaataaggttcggatcagattggcatgccgtactttttgggtttggcgccgcagccgactcgctgtgaagatagcgctcatttctgaaactgcagtttcgaaatgctcattaataatcgtgtagtcgaattcgtcgtagtgcgccatttcctcgtggacggcagctaagcgccgatggatgacctcttcactgtcttggccgcgtttacgcaggcgttcttccagtgcggcgcgtgagggcggcaatataaatatgctgattgcatcagggatcttgttgcgtacttggcgtgcaccctgccagtcgatttctaacagcacatcgtgaccggcagccagttgtggctccactgattggtgtgcggtgcctttccaatcgtcatggaccaatgcgtactcaaaaaagtcacctgcctcaatcatgcgctgaaattcatcggctgagacgaaatagtagtgctgtgcatggcgctcattgggtctgggttgacgtgaggtgaaggagatcgacagagcgatttgctgatcgcgttccagagtggcgttgacgatgctgcttttaccagtgccggaagcggctgaaacgatgtagagggtgccgcgcatagaatagagattgctcagtggacaatggatcaggtggatacttggtgtgcgatgtcactgccgttgaaggcactatttcggttattcgatgttctgcacttgctcgcggatctggtcgatcagtaccttcagctcaatcgtggcattagaagtgcggctgtccaccgattttgagccgagtgtgttggcttcgcggttgaattcttgcattagaaaatccaggcgccgcccgacgggttcgcgttgctggaggatgcgatgtaattcgctgatgtgactgctgagccgatccaactcctcatccacgtctagcttttgtagccatagcaccaactcttgctcaatgcggccgggatcgacgggatacgacaggtgattcatgcgagcgcttaatttgttgtgttggccttcgcggatggtgggaatcaggatgcgaacctcgccgacgatgcgttcaatggcactagcacgttgcgcgatcattgcttgcattttgagaccttcgcgttcccgcgtggcaatgaagttattcagtaccttatccagcagcgccacggcgtgtccttgtaacgtggccatgtcgatctgctcacccttcaggacaccagggatctgtagcagctctgcaaatgtgacacgtaacgcggggaactgtgctgataggcgtagtgccagggtgctgagctgggataacagcagttcgttcactaccagcttcccagtgtggatctcctgtggtgataggcgtactgtcaaatcgagcttgccgcggctgacccgtgcggccacgcgctcacgtagttgtggttccagagcacggagttcttcaggaaggcgtatgacgatatccaggaagcggtggttgactgaacgcagctcgcaggctaacaggccccatggtgtaaggtgctcatctgcggcgaacgcagtcatgctatggatcatattgctctcaaaatatggatggtaccctagcgcgcccatgcggggccttaaggcggctcaatttttcattcactatgactaataagaaaaaaccgatatgaatgtttcacgtcccagtggtcgtcaagccgatgcgttgcgaccggtgcgtattgagcgcgcctttacctgccatgctgaaggctcagtgctagtcagttttggtaacaccttggtagtgtgcactgcaagtgtggaggccaaagtgcccgtgtttctgcgcaataagggggaagggtgggtcactgccgaatatggaatgctcccgcgttccacccatacgcgttccgagcgcgaggccgcacgcggtaaacaggcagggcgtaccttggagattcagcgtctgattggacgtgcactgcgcacctgtgtggatcgcactgcattgggcgagcgcacgattaccttggattgcgatgtgttacaggcagatggcggcacccgtaccgcagcgatcaccggtgcttatgttgccttggtcgatgcagtgcgttgtttagagcagcgtggtcaattgaagaagtcaccactgattggtgccgtagcggctgtctcggttggcatttaccgtggtatgccagtcttggacctggactaccctgaggacagtgattgcgacactgatatgaacgtcgtcatgaacgatgaggggggggttatcgagttgcaggggaccgctgagcagcaggcattccgccgcggtgaactggacatgttattggcgttggctgagcgcggcaccgccatgctatttgacatccagcgtgaagcgttggcccgctagaatcgcagatctgttgggcgccacatgcattgccgtgatgattgacgatgaagccatccacgggtaatgcatcaatatgattggaaccgaagatgatgaaacaactagttcttgccagtggcaacgcaggcaagcttggggaattacgcgccatgcttgccggagtggcattgcagatcaccgcacagagtgaatttggtgtgcaagatgtgccggagacgggcttgaccttcattgagaatgcactgatcaaggcgcgtcacgcgtgcctgatgactggtttcccagccttggcggatgattcggggctgattgttgatgccttgggtggtgcgcccgggctgtacagcgcacgatatgctggtaccccgacggatgcggctgccaataatgccaagttgttggagatgctgcgtgacgttcctgtgggcaggcgcagcgcgcgtttttatgccgtgattgtcttgttgcgtcatgctgaggatccgcagccactgattgctgatggttgttgggagggagagatcgtctttgaaccgtgcggcagtggaggctttggttacaacccgatcttcttcgatcccttatacggaatgactgcggcacagatgggggctgaattaaaaaataagatcagccaccgtgcccgtgcgttggagcagttgcgtgactgcttgcatacattcatggcttgatccatgccatacaccagagcggcgtcattagcggatcaccccttcattgcatactggatttgatatgtgccgcctggctgccgttgcgatggagtgaacaagcacccgcccgtcgatggtgttcctgtcacccggtgttgcgcgcggtgaacatgattaaacctttagcccgcttttttggggtgtttgttttgtttccttatcgccatcctattgttgcccatgttgatcccgccgccactttcgctatatgtgcatttgccttggtgcgtgcgtaagtgcccgtactgtgatttcaactctcaccaagccaagggtgcactcccgttcgatgcttatgtcaacgcattactgcgtgacctggagtacgacttacctttggtgtggggccgtgttgtgcacagtgtgttcttgggtggcggcacgcccagcctatttcccccggaagcgattgaccgttttttgcagatcgctgcggcgcggctgcgtcttgctccggatgctgaaatcaccctggaaaccaatccggggactgccgagtatggtcgttttgatcgttatcttgccgctggcatcaatcggctgagctttggtatccaaagttttaatgatgttgcactgcggcgattggggcgtattcatgacagccttcaggctgagcacgctgtgaaactggcacaagatgccggcttcactaacatcaacttagatctaatgtatgcgctgccagaacaaaccttgcttgaagccgagcacgacttacagcgtgcatttgccctggcgcctacccatctttcctattatcagctcacccttgaacccaataccgtcttctacgctcgcccgccgcagggcattcccgatgacgatgccgcgtgggagatgcaggagcatacccaacgcctgcttgctgaggctggttaccagcattatgaggtcagcgcttacgcccgtgagggctggcagtgcctgcataatctgaactattggcgctttggagactaccttggtatcggtgccggggcacatggcaagatcacttccggagtgtcacagcatgtgttacgccgctggaaatgtaagcatccgtacacgtacttggacaatgctggtactgtctctgcgatcggtggtgatgagatcgtgccaacggcacgcttgccattcgaatatatgctcaatctattacgcctgcgcgcaggattccgattacaggattttgctgtacgtacaggactgaccgttgaatcaatccatgcagcattgagtgaggctgttgcacgcggttggttacgatgtgaacttgaacgcgtcatcccgaccgaattagggttgcgttttgctaatgatgtcatcaacttattcaatgaataaatgggtaagcagtacatggcctctttgccagaaacgtgctagaaatgtgcggtttatcaaagtattgattgcatcggatgtttgcggaaccgctcggcaaaacttccagcttacctgccaatatggccttgtctcctcgcgctagtgtgttgttgcagggagtgctgaactgttgcctggatagtttgggtccagcacttatggacaccttagccgcgctggagcaggaattgtttcagcttgccgcgcgcgcgcgcagcactcaacagcaggttgagctgtatgtggatatgaagcgcctgcgtgaccgtaaagaaagcttcataccgtgtttctgtgaaggtttggtgcgtgcttttggcgcattgaacatgtcgtgtgagcagatgacagctgctgcactgccccaggctgaaaatagcgagattgatagggacatcgtgttgcatgacatcgccggccgcagtgtggtacgccatctggatgcgcttcagatgcttggccagcgtttggcggtgttagtagccatgccggcattccagcccgagcggatgcctatggggccgcagctgctgtgtcgcatcttgcgtgagtgtggagaaacattggggctgaatccaaacacacaggtgacgctataccgtgtgtttgaatctaagagtatggaccgctacggtcacttgcttgagtgtgccaaccgcctgctggatcaagccggtatcttgcccaggttggtttctttgcccgaggtggcgcgttcagtgttaccgcgtccacacgatctgcctggcaatcttgccgacacggtgatgtgttcgaccgaatggtgcaacgcgacgctggcgccgcgttgcaccccagtgactgcacaaggcgtgaatctagccccgctgccagcggtacctcagtgttccacgatcacgaatggaacgggtgtcgatagtgacgtagacagtgatacaacgttcccatcggttgcccctgatctcagccagatgtctggtgcactccagacccgcatgtccactttattcttaccttctggagccggtggtgagactgttttatgtccaccaggggctcagctcaacgggcagtttgctgtgatgccgagtgcgtttcctgggtacacgatgaggatgagccaggtcttcaccttcccttccgatacagagattaaaagtaatcaatcttctgatgcccctcaggccaggacattgactccattttctgcatcgtacctgtcaggtatggacttgaatcagttgctcagcgcgttacaggctcgcaccgctgcgacttctcctcgcggtggtgcttggcgcagtgtgcgtgagttacgtcagcacgtgctggttaacctacgtgctcgatatggtgcagcgaccgtcttgtcggtacaggatgagcacgttttcgaactcattgacatgttgtacagcgagatagaacgcgaggtccgtggcagcagcctcgtggcggacttactgacccggttgcaagtgccggtgttgcgtgcggccttgcgggaccccagattcttcgtccgcgatcagcatccagcacgcgaattgctcaatgttattgctgaatctgcgtccacttggctcggtgatgaagatcttgacccgcaattattgcaacttctcaacagcgccgtggacaaggtgctgcatgagtatcagggtgaagaagcggtgttcgttcaagcgtatcaggacatccaagtcggctattgtgcacaggtgcatcaggcagcggtcaccgagcgtcactatattgaagccgcacgcggtcaagaacgcttggagcttgccaaacgccaagcgactgaaaccatcgaacgcttgtgtgccgttgctccgccgccccgttttgtgaagactctgctgcgtcaagcatggttagacgtattaacgctgagtgtgttgcgtcaaggaaaagagtcgcttgaatggcgggagtatgaagcattgaccgagcgcatctgtgcgatcacttccaccctagccggtggtgccagtgatcctgtgttgagggaacaggtcgagcaatccttgtaccacgttggttatggcaacattgaggccagcgcgattgcacgccgcttatctacaccagacggtgaggatgaattgatgtcccggaccgaattggcagcgcggctgaagcaccacaccaggtttggcgagtttggtgagcagattgaaccaaggcccttacaggagactatcctgcctcgtaacaccgttgaagaaacatgttacgcacagttgcgcacgttgccgtttggtacctggttggagtttgtgatgaaccagcaaggtgacgtgcgtcgtcagcgcttgtgttggtacagtccggtgacagaccatgtcttgctcgtcaacccacgaggacaaaagagtaccgaacacacgttggacacgcttgcacggctgcttgcaaacggtcagcttcgtatcgtcactgaagaagaggggcggttgattgaccgcgcgtggagtgcaacgctgcgtgcgctgcgtcacctactcggtgcgcgagatacttttgagaatctccacgcatgattcatgaatctcgccgtacgctgcgccgccaagtatccggaggcattggcgtgctcgacatggtggctgagcacatgattggccagctcagcaacctttcagaaaacggcatgcttgtcttgtcccatacctctttggttgacgatgccttgtaccagttgcgttttcaactatctgaccagcaagagcggttgcgacagattgacgttggtgtgcatctgttatggtccaggccagcacaggagtgtgggcatgtatgggctggcttccgcttcttgaccgtgtccgatgaacatcgacagtacctgcgccgttgggtcgacgttgggtattgacatggtgtgaccgcagcgctgaattcggccaacctcatggaagagggagccatcgccactgaacctgctcatggtgtggatctcagacgaaggagtccgttgcacataccaacgcatcaatgttttgaggttcaaatgcagaatgacctgcacctggggtgatcttcaaactggcctttggccacactttatgcaggtcccaggcattttgaagagggcagacgacatcgtagcgaccatgcacgatgacaccaggaatattcgcaatgcgctgcgcatcgcgtagcaattggttttccacctcaaagaaaccgccattcacaaaatagtggttctcaatcctggcgaacgccaacgcaaaatgcggattttcgtgactggcgataaaatcttggtccatgtacaaacagctggttgccccttcccagaggctccatgcctgggctgccgctaagcgcgtggcttcatcctcactggtgagacggcgatgaaaagccgagatcaaatcgtggcgttccaccggcgggatcactgcaatgtaacgatcccaggcatctggaaacaggtggctggccccctcctgatagaaccattccagttcccagcggcgcaacatgaaaatgccgcgcaacaccagctctgtcgtttgctcaggatgggtttgggcgtaagccagcgccagggtggatccccaactgccaccgaacacttgccagcgtgtaatccctaaggcgacccgtagtttttcaatgtcggcgaccagatcccaggtggtgttattggtcaggttggcatgcggcgtcgaacgcccggcaccgcgttggtcaaacaacacaatgcggtatttatcgggatcgtggaaacgtcgcatcttgtcattgcagccgctgccggggccaccatgaaggatcacaacaggcttgccatgcggattgccgcactgctcgtaatagagcctgtggttgtcatcaacacacaatatgccatgctcgaaaggggtgacctcaggatacagcgtacgcatagacgatacctggttaggaaatagtaaacagcgaatgtactaccaatcacggttttcgatcactgcctcggtccccgctgagtcgctttagatattggcaatgtaagccacgtgagcagcgatgaagttgcgtgctacgggtttaatccatcaatatcctgcgtgcgttgtcaagctgattgtgcgggaaagtaagtgcctcctacatctcattgcaggacgctaaagaggccgacctgctgacattgcgaccgcaatgcgctccacagatgagcagcctttggctgggatgccgacttgaaaatggcctgcattgtattgagtacgacacacagtaccgctgtgcttttaaaaaccaggacagcgccccacggtgacgcggtcgcgtgcttccaagtcttgcacggtggccactgccaccaatcccgccgtgtgcagtaatgtccgcatggccgcaccttgatcccaaccatgctccatcactaaccagccccctggccgtaaatatgctggtgcccctgcagtgaggatgcgcagtgcgtccaatccgtcgccaccagagatcaatgccgatggtggttcaaaacgcagatcaccctgcgtcaaatgtggatcagtgacggcaatgtaagggggattgctgacgatcagatcaaagcgttcccccaacagtgcctcataccaatcgccttcccgaaacaccacatgattgagcccatgtgcgctggcattgcgtgcggcaatgtcgagcgcggctgcgctgttatcggtggctaacacctgtgcctgcggccgttcgcaagcaatagcgagtgcaatggcgccgctgccggtgcccagatcggccacgcgtcgctctgaagcatggtcgagtcgctgcaatgcttgttcgaccaacgtttctgtttctgcacgcggaatcagcgttgctgaggacaccattacatcaagcgtccaaaatccacgccgcccaatcagataagccacggggataccgcgagcacgttgctccactagcgcttggaagctctccgtcgctgctgctgccagggggatgtccccatgggtgaacagccacgcccgatcgcagtccagggcatgcaatagcaaggcttctgcatcgactcgctcaatgcgttcagtggcggcggtaagcaaagcgatcggtgatggcattgaaaggctgaattgtggagcaaagcggggtgctgattatccgccctcattcccatcaccgcatcctctaagaaaatgcagatggcgactgtgatcaccgtgacaacgagtaaatatgtttgactgatataaatgcgatggatttttataaatttccatacagtttccctccccctgaataccagccatcgttccgaacgttgtttacatggagtcatctacgtgctgagtttgaatcctttcacctatcaggaagaaaaacgtagcgccttgctgcatgacattaccccgatcatagctagctctaatttccataccgatggtgcatatcttgaacgccatctccgcccgcatactttattagataaggtagatggtatgtatgaggtcaaagcagcattgcatcattcgcgtggactcacctcaatcgcatctgatgcgttgcattcactacgccgtgccttgcaatctgtgtcgatcattaaacggtggcagccagcagacctgcttatctttagtcacctgcgttgtatgcatgggtgtggcgagatacaagggcaatgctggttgcaacggtgttatggatcgtatgtttttccgtccggtaccgtgtttcaattgagtcagcccttattattccaaggtgatgaatgatcgttgaagtgtttatcagggtatttttcttaatatgtacggccgcgcttgggtggggggccggatatatcctgaaattaagttcaaaagagatatcttcattgttggtctatgtggtgtcaccattcgttatctttgtttccatattgcaatctcctgcggattggacctattttgcatattcattgggcgcattattgacagcatccgtcgctgcttttcttgcatacggtctggcgcgaatgatatggagcgatggaagagtgaatcttttttcatttgcagcaggcactggaaatacaggatattttgcattaccccttgcatttgcactgtttaatgtacagcaaattgctattgccgtttttatcatcatcggtattaatatctatgagtttactgttggatattttattgccgcgaagggcacattcaaaacaacagaaagtatgcggaaaatagttcgactcccaatactgtatgcaattattcttggaatcacgtttaaaaagtgggacattgatgtaggagcaacattactctctgcgatgtccaattttaaaggtgcttatagtgtgttggggatgatggtgattggggtgacactggcgtcttaccaaaagatcaagattgactggggatttttaatagccactctcacgtggaagcatctgatctaccctgctgttggagtattgattttttattttataactccagtatccatcgacacacttgcagtgattgtcataatgttagcaacaccgatggctgctaatacggttgtggtggcaaacactctcaatgtctatcctgagaaggttgctttttctgtcatggtcagcacgtttctagctgttgtgacagttcctttagcaattgtatgggtgactcgcctgtctcattgatgtttagagttgatgaggtggttggattttgggtgatccatgatgtttctccgtgatgcgtatcggggagggcatccagctttgccgctctgtgatttttgtatatcgcgcgtgctaattgatgtgtacaagaagctttctgtggcggttggtttgaatggcatattgctctatgtccatctggggattgcattttctgcatcaaacctaatggtgcgttctaaagcgcattgagctgctggattcacgttgcgctcacaagcgccacaggtgattgacgtgaagttagaaggggggtaattaatcttggtggttttgatttttatgctgcttgtcatgttgtattgcgtgagtatgtcaaaaaaatcatcttcaattattcgaaatattgattttcatcaatattaaaatgatgtaaatcacaatattggttgcggtgatattaggtgataccaatcccaatatctaaaaaaataatttaaataaattgatttttattgattaatcggtgttagctaatacttggcagtctaaatgggtcagggttttaggtgtctctatatatacagatgcgaaagtggaaagtgtgattatttttgttatttattgtgatgttgattaaagaattttagtcattcttgtttccaggtatctctcataatcaatatgtttttttcaagggttatttacaggagtagcagtcgatgaaagagaatcaaatttaccgcaaattctggaatctctctttgggttcgtggagtgtggcctcgcatatgactaatgatggaggttgcagtgatgttgttttacgtcattcaggcgtacgaaatcgtagcttggtgctggcaatcggtcttgcgcttacaagtgttactcatgcccaatcggtgaaaagtcctgcgatggtcacggcgagtaaggtcatggtggctcatgtggatagtcaagtaaatcgcaccgctgatcgtattcctacaggcgatgggtcggagttgatgacacatatggcgctagattggaaattcttcccctttggcaataatagtattgcaatcggttacttctctaaggcttttgcgccgaatgcgatagcgctgggttacaacagctctgtgactcagagtgccaacaacggtgtcgctcttgggagcaatagcaccgtatcaggggtcaattcggttgctttgggtgctggttcgatggcttcagagcttaatgtgatttctgttggtggtggtgatggggtgactggtcctgcggtgcggcgcattgtgaatgtgggtgatggtattggtaataacgatgcggtgaataagtcgcagttggatggtgtgacggcatcagtgaatgatgtggcggcatcggtgaagacgattgccttaacgaatcaagtcaccggtagcagtgttgctagtgctagtggtaaggaaagtactgcgataggttctggtgcgcaggcggtggctgataacactgttgcttttggaggacgtgctatcgctaacgctgttggtgccagtgcgttaggttttgatagccatgctaagggaatcaacagtacaactgtggggacacaaagcgtctctctgggtcaaggtggtgtgtcgctgggttacaacagttttgttggcgagggttcattcaacggtttggcgcttgggagtaacagcctcgtattgttacaaggcgtcgactcggttgctctaggttctggttcgatggcttcagagcctaatgtagtttctgtgggtagtggtgatggcttgcgtggtcctgcggtgcggcgcattgtgaatgtgggtgatggtattggtaataacgatgcggtgaataagtcgcagttggatggtgtgacggcatcggtgaatgatgtggtggcatcggtgaaaaatattgctggggcgattcaaatcaccggtagcggtgttgccagtgtcagtggtcaggacagtactgcggccggtgccagtgcgcaggccgccggtgatagcagtattgctttgggagcgcgttcccgtgctaacgctattggttccagtgccttgggtgtggatggtcatgctttgggggccaacagtaccgcgttgggaggtcaaagcactgccatcagtgagggtggtacgtcgttgggttacaacagttttgttggccagagtgcgaccaacggtatcgctcttgggagcaatgccatcgtatcaggggtcaattcagtggctctgggtgctggttcggtggcttcagagcttaatgtgatttctgttggtggtggtgatggggtgactggtcctgcggtgcggcgcattgtgaatgtgggtgatggtattggtaataacgatgcggtgaataagtcgcagttggatggtgtgacggcatcggtgaatgatgtggcggcatcggtgaaaaagattgttgggacgattcaaatcaccggtagcggtgttgccagtgccattggtaaggacagtactgcgaccggagccagtgcgcaggccgtgggtgatagcagtgttgctttgggaacgcgtgccactgctaacgctattggttccagtgtgttgggtgtggacagtcgtgccagagggatcaacagtacggcacttgggcgtcagagcaatgcgatcggtgatggcagtgtgtctctggggttcaatagctttgttcgtcagagtggtgagcatggtgttgcgttgggtactgatgccggtgtttctggaaaagattccatcgcgctgggttatggttcgcgtacttatgaagccaatgtgctgtcaattggtagcggtaacggccgtggtggtccggcgacacgccgtattgttaatgtcagttctggcaatctatcgcagctgagcactgatgcggtgaatggtgggcagctcttccagaccctaagtagcatggccagtattttaggcggtggtgcggcagtaggtgcgcaaggggtgttggttgcgccggtgtatcaaatacagggcagtagttacggcagtgtgggtgcagcgctcaaggcgctggatggtaaggtcactgatattgatcatcgcgtgaatgtgaatagcaatcttgcggcgggggctgctgcgtctactctcagtgcttccaagccggtatcaatgtccagtacggaggctgtgggcgttgccaaggttgtttccggtgtggctgtgtctgattcgagtgttgctgccaatgcgcaggtgctctcgaaaggaagtggtgtcagcatttcggcgacggggggtagctctcagagtagtgatgaggtgcaaacgagttcggtgggcatggattcgctaggcagctcgctcaatgtacgcaaggtgacgatggctgcaggtatgttggcaaccgatggagtgagtaaaacgcaattggataacagtatggcggcggccaatagctatacagatgcacggttctcggcgttgaacgatagtttcgagagtttgcgtagtgatgtgaatggacagatgcgtcggcaggatcgccggatcagtcgccaaggagcgatgggtgcggccatgttgaatatggcgaccagcgctgctggaatccatacccaaaatagggttggtgctggtgttggcttccagaatggtcaggcagcactttctctgggttatcagcgtgcgattagtgataggagcacggtcactatcggtggtgcgttcagtagtggtgatagttcggtaggcgttggcgcgggtttcggctggtaatgtgtatgcgcgggcagccgttgtgctgcccgcgttttttctgtcttgttcatttgttttacgcgtccactcggcgattgggactgcaatttcattcacgcaatcttcgtgtttttcgggagtgaacgaggttatctgttttctaccttcaggtgcgattcggttggtgatgaaagtgtgtggcttaataaggggaatttattgaagagatgagcggtcgttattttatggtgtccgaatgtggaaaataggaataacgacaatacgttgctgtgggttgttggcggaagtatgaatgtaagtatggaagcatccatcgtcgagtcgttgttgcagcgtcgttgcttgaaagaaagcgatctgtatcgcgcgcgtcagttgcaggccgaatccggtgttgggttgttacctttgctgggtcgtcttggtttggtttctgagcgcgatcacgctgaagtatgtgcggaggtgatggggctgttgttgatacaggtgcgtgaattgccggatacgccgccagaattgtcggccgaggtgcaagggttgtccattcgctttctcaaacagttccatgtatgtccgcttgctgaacatgatggtgtgttgcagttgtgtgttgcagatccatttgatgtgtacgccattgaggcgctgcgccttgccacaggggcaacattgcaattgtgtatcggtttgcgttccgaaattgatgacttggtcgagcgctggtatggccagggccgcagcgtcatggggatgattgtggaggcgaccgatggtgatgcggcgcccgcagatgacattgaggctttgcgtgatctggcgtctgaagcgcctgtgatccggctggtgaacttggtgatccagcgtgcagttgaattacgtgcctctgatatccatatcgaaccattcgagaatcggttgaaggtacgttatcgcgtcgatggcgtgttgattgatgcggagagtccgccatctaaattggctgctgctgtggtttcacgtgtcaaaattatggccaaacttaatattgctgaacgtcgcttgcctcaggatgggcgaatcatgttgcgtgttcagggtaaagagctggatctgcgggtgagtgttgtgccgacttcacatggtgaaagcgtcgtgatgcgcctgcttgatcgtgagacggtggtattcgattttcagaagcttggttttattgatgagttattaaacaggttctcccgtgtgttggagatgcctcatggcattttgctggtcactggcccgacgggatctggaaagaccaccacgctgtatacggtgttaaatcgtctcaatactaccggtgtcaagattattacggtggaagatccggttgagtatcagatcgaaggtatcaatcagatccaggctaagccgcagatcgggctggattttgccagtgcattacgcagcattgtgcgtcaggatccagacatcatcatgattggtgaaatgcgggatctggaaactgcgcgcattgctatccagtccgcgctgacagggcatttggtgctgtctactttgcataccaatagtgctgccggtgggctgacccgattacttgatatgggtgtggaagattatttgttgacctccacaatcaatggtgttttggcgcagcgtttggtgcgtcgcttggagcctacgcatgctgagcgttatcttgcctcgccagagcaggttgcgcgttttgatttgcgccgtttacagccggagggtgatatttatttgtatcgtccgcgcgcttcagcgttggcacccactgggtatctgggtcgtacggcgatcgtcgaatttctaattatggatgatgcgctgcgccgcgcggtgatcagccgtaccggcataggagagctggagcagatcgcacgtcaagcagggatgcgtactatgtacgaggacggtctcatcaaggcattggctggtgagaccacgattgaagaggtcttgcgtgtgacggaggaaggctgaaggtgtggttgccaatggacgttgagggataacacatgccggtgtatcgctataaggcgttggatgtgcgcggtgacttactggaaggccagatggaagcagccagtgaagctgaggttgccgcgcggctgcaagagcagggacatgtgcctgttgaggcgagtttgtccaacggcgatgcggtcaggccgtcattgcgaaattttctgggtgagaagccattttctggtctcggcttgattcatttcactcaacaattggcggcgttgctcggtgccggtcagcctttggatcgtgcgctttccatcctgacggatcttccagataacgagaagagccgccgtattattggcgacgtttgcgacattgtgcgtggtggtactccgttgtctattgccttggaacgtcagcatggtgtgttttcgaggttgtatgtgacgatggcacgtgctggtgagagtggtggcaatatgcctgagacgctgcagcggctggctgattatctggagcgtaaccaggtggtgcgtgccaaggtgatcaatgcgctgatttacccggtgatcctgatttttgtggttggcggtgcgcttgcctttttgcttggttatgttgttccgcaatttggcgcgatgtatgagagtttggatgtggcgttgccgtggtttacccagggcgtgctggcattgggtcatttcatcggtgattggtggttcttactattagcggtgattggcatcggtgtgatttttgtcgagcgtaagcggcgggatgttgcattccgtgcgcggttcgatacgtggttactgcgtcaacgtctgttgggtacgctgattgttaagttggagactgcccggttggcacgtacattggggacgttgctgcgcaatggtgtgccgttgttaagcgcgttgaggatttcccgtaacgtgttgtccaatgcagcgttggtggatgatcttggtagcgttgccgaagatgtgaaaaatggtctgggattggcgggagcgttggggcgtggcaagcgtttcccccgcttggcggtgcaaatgattcaggttggtgaggagtccggtacattggatacgatgctgctcaaggcggctagctcattcgagcaggagagtacggtgatgattgatcgcttgcttgctgcgctggtaccagcgatcacgctggtgatggcgatgattatcgctgtggtgattctgtcggtcttggtgccgttgtatgacctgaccaattcgattggctgatcaacgcagtttcttaatggttgcctgctcgttgtgctggcgctagtcaccgcgctggtgatggctattatcatcaattacgttgatagtgttggttctggcgttgttgtacggctggagcaatttgattggctgattaacagtgttttttaaatgaatatgggtgcgctctgcatctgtttttccctacttttatcgaggccggaggccgcggcgatggtaaaccgacgttctatcacatgtagtccagcgcagatgcgtcaggctggtatgagtttgctggagatcattattgttattgtactgattggtggtgtgatcgcgtttgttggcagtcgtgttcttggtggtgctgatcgcggcaaagcgaatttggtcaagtcgcagattcaaacgttggcgggaaaaattgagaactatcagctggacacgggtaagttgccaggaacgttgaacgatttagtgaatccgcctggtggcgtgagtaattggcttggtccctatgctaaagccgctgaattgaacgatccttggggacatccaattcagtaccgtgtgcctggtgagggacgaccatttgatctgatgagtttgggcaaggatggtaagcctggagggtctagttacgatgccgatatcaagtacgaataagcagcatgttgctttgttctgctccgttccgttttcagacttcttcaggtgcgtcggtacatgcacagggcgtttcgttgttggaaatgttacttgtgattgcgttgatcgccttgatcagcttgcttggcgttgcggtgttgtctggtggtatggatggtgtccagctgcgcaacagcggtaagcagcttgctgcggagttgcgttacacacgtactgtggcgttggcgacggggacggcacagcgttttatgatcgatccgcagcgacgccgatggcagggacccaatggtcatcagggcaaattgcctggtgcattgcagattcgtttcagtggtgcgcagcagttgcagacgtcttcgggtgagggggtgattcagttctacgacgatggtgcttcaagtggtggacgtatcgatctggaaatgaagcgtgcctattggcgtattgatgtgggttggatcaccggtgaggtgcgttccggaccgttgcggacatctgcatcattatgaagtgtcagcgtggttacagtttgctggaagtcattgtggcgtttgccattttggcgttggcgctgagtttgctgctcggtaccctgacaggtggaacccgtcaggtgcgtcgggccgatttggcctcgcaggccacgttgtacgcgcagtcgtttcttgcccaacaaggcgtcgctatgccgttgcatgtgcagcatcagcagggcgcgtttgagaacggtcgttttcgttggatgttggagacgcgaccctatgagaattcaccacgctcaccggacggtgctcaattgctggagttgattctgtcagtgcgctggggtgatgggcctgatcaatcgttgcagtggcggacattgcgctttgtgcgtttgcaaccgtctggtgacgaactatgagacggatggccggtttcaccttgatggaagtgcttttagcaacagtgctactggccagtggtcttacgttggcttttgtgacgttgcactctgccagcatagtgagtcgacgcagtgaggcgctggcttcccgcaatgagcgcatgagagcagtggagttgtttttgcgtcggcgtttgatgggcgcgttaccgctgaagatgggggaggataaggagcggcacatgccgttgctgtttttcggggagccgcagcagatgcgttttgtcgctgatgtgccggattatctcggtcgtggtggtccttatgtacacgatatcaacgtggttcagagtggcgcacagcgccaactgcgtatcgcactgaccatgttgcagtctgacgaggctgtgaaagaggagccgtcgttgccgtcggaattacttgctgatggcttgcatgaagtgcatttcagctatcgtggttgggatcaatcacgtcatcaacttggtccttgggtggctacttggccgtcttcggatcaattaccagtgtcagtggctgtgcagattaaggatgacattgcacagtggccgacactggtcgtggtgcttctgcagtccaattccgatggagggggctagtgaggtgcgcgcgtggagccgcattgatcgtagtgttatggctggtcatgttgttggcggccatgattggtgcgtttgctctctcggctcgggtcgagcaccttcagggggcggttctagtcagtagtgcccaagctcaggaggtcgcacgtgctgggttggaatacgcggtgtctcggcttcaggacagcgattcggttcaggtgcgttggatccccgatggccgcccctactcttggcattacgcagatgccacgctggagatgcggatgattgatgagagcggtaaggttgacttgaacgttgcagatctgcaactgctgaccgttttgattcaggcattgggtgtcgatgttgcgcgtgctgcgcgtctggctggagcgatcatcgattggcgtgataccgatcatttggtgtctcctggtggcgccgaagattcagattacgccgcagctggtttgccctatggagcgaaggacaatcctttccagagcatcgctgagttgcgtttggtgttgggaatggatagggatctgtatcgacggatgctgcctaacatcactatttacagtgggaatttgcagccagaagtacgttatgcaccggtcccggtgttgactgcattggggcaggatgttgcggcggttctggccaagcgtcagcagttgtctccgtcagatgtgagcaaacagatgggcagtggcacttacagtattgagagcaaggtacggctggctcaggggcgcgaagccgtgttgcgcgcggtcgtccgcatgggaggggggcgtatgccaggagcgacttacaccattttgaattgggaagagggtatcgcatggcaatgagtaaatggtgggggagtttgaggtggttcggtgtgagtattgcccccggtgtgggtggattctggcactggtggtggcagtcgctgttggcttggttacctatgcgctgccgtgtgcagatggggctgctctcagagcgtctcttgctctctctacaggctgatggtttgcacttggtgcgtcagtgcggtgatgttttagaaccgctggtacaggtgccgtggcctatcacgcctcaggaactgagtgggatgttgttgccgaagttgcagatattaccgcggcactggctgctacctgccacgagtgcgttatgtcggccgttgcgtttgcctgctggggcgtcacagcgtctgcatgatgtcgtgcgctttgaaattgatcgtcaaacgcctttccaggccgaacaggtttattacgatgtgcgtctattaaaaagacatggtgatgatgttcaattggaaacggagttggtcgtggtgccgcggcgtttggttgacggttccgacggtgttcctaaggaatgggccaccactctggcgggcattgatgtggctgatatgcagggccaaccgttgaatgtgaatctgttgccgcccgtgcagcggtggcggtgcagtgatccgatgcgacgttggaatctggttctagctgcggtcgcgttgctgttggtggcgactgccggagcgctgttgttgaataatcgcatccgtgtggctgaggaactgcgcttgcaagtgcaggcgcatgccatcagtgcacgccgcgttgcggctgaacgtcaacgattggtcacgctgattgaaggtgttcgtttccttgatgaacgccgcactctgcgcccgacagtgatcgaagtttgggaggaactgagccgacgcttgccgaacggcacctatttggaaaaatttgcgattgaggatggacaattgcatttgatgggcatgagtaatgatgcatcctcgttggtgcgtcttctggaaggttccaagttatggcgcacgccgtcattaagcagtgtgctacagagtaatgtgggaagcagtgtgaaccgtttcgtcatcactgcggaattggctggagtggttccgataaaggaggctgctgatggcaaggcacaacgttaactctgatcgttggttggcacttggtttgttgtttataaagttgtccgtgctctacctgttgctggtttatccttggtttactcggccgatgttgagcgtacagcaacagatccaggtgttgcgtgatcgagaattgaggatcaatgcgcagttgcaacagggtccgaacttggctgagcaattgcgccgtattcaggtgttattgcggtctcgtccgggattcttgcccgagtcttcggttgagcttgcatcggctggcttggtacagcgattggagggggtcgtgaacgatgccagccctggtaaccgcagttgcgccattattaaccgctcgccactacagccagatatgcatgatcgttttgtgcgcgtggcggttcaggtccgtttgcgttgtggcacaccggagctggcgttggtgttgtatagcttggaaagtggtagcccacgattgttcgtgaacaatcttaatgtgatggcgcagcgctatccgctttcgcctaatgagagtggtcatgggcttgatgtggctttcgaattggctggctttttaagccccgggggtgatcatgtgtcctcttccttgccgcaaaggagcagcaatgcgaattgatgctttttcggtatggacttggttgtttgccacggttgcaggctgggctgccttggtgtgtctattggcgttggcaggcatgggaagaagcgtgcaactgcttcgtgatgattcgcaattcatccggcagaagttgccatcattgcctgcttcagcagccgagcattttggcccatttacccgttatggtgagattgctgcgcgtccagtgttttccgaggatcgcaaaccacatccgttcctgttggtgtcaggtgaaaacacgagtgttgaaagcgatgtacgtttgaccggggtgctgatcacacctaaatttaaaatggcaaccttgaccaacgagcaaaaccagtcgctacggatccgtttgggtggagatgcagtcaatgggtggcgcctgattagtttacagccacgcagcgctacgattgaaggtgctggtggtactcgcactctggaattacagccctttaatggtcaggccagtagaaatgcgaacaatcctcctgaaaataaggtgccgacgatggttgagcatcctgttgcgtcaccctcatcggaggctgcctcggctgctttagtaaagcctggtacatctgctgtttcgcaaagtgacagggttcctgggggacagcaaccggctgcagtgacagggccgcaagctcctgaaaagcccattgatgcacagatacgtgctatccgtgagcgcattgaagcccgtcggcgtcaacttcagcaacaacaagagcaacaaaagtaacagcacagcggttctttctgaccagcaccaataagagtgaattcatgatttcgcgtcttttaactgtttcgatagtcactgcccttttgggtgcttgtgttaccccaccatcgccgatgattaagcggaatactcttctgcataaacatcctgccactacagacataccgacgacacagctccctgacgctgtggggacggccactgtgccgctccctgacactacggagacgccgactgcgctgctttctgatgctggtggtccgctcccggtgattcgtcgtggtaatgggaaagtgattaatcagactgttgctgcaactccaccaccatcaatgggtgtggctggaaaaggtagcgctacctttaacttcgaaggagagtcgttgcaggctgtggtcaaagccattcttggcgacatgctcgggcaaaactatttcattgcatcgggcgtgcaggggacggtgactctctccacacctaagcctgtctcgtcggcacaggcgctgagtctcttggagatggtattgggttggaacaacgcacggatgatttataacaatggacgttacagcattgtccaggccgaccaggcgctagctggtacggttgcgccgagtactgcaccgccggcggttgcccgtggctttgaagtccgtgtggtaccactgaagtacatctcggcgagcgagatgaaaaaagtgcttgatccatacgcacgtcctaatgcgattgtcagcattgatacaacgcgcaacctgattacccttgcgggtacccgtgttgagctagagaactatctgcgcactgttcaaattttcgatgttgattggttgtctggtatgtcggtgggtgtgttcccaattcaatcaggcaaggcggataaagttgctgccgatttggaaaaagtgtttggcgagagcggaaaaacgcctagcgccggtatgttccgttttatgcctctggagagtgctaacgctgttttggtgattaccccacaggctagttatctggatcagattcagaagtggttggatagtgtcgacagtgttggaggtgctttgagtttgttctcttacgcgctgaagtacatcaaggccaatgatttagctaatcgtctgacggaagtgtttggggtcggtgctaggcgtgaagatagtaatgtgtcgctggctccaggcgcgcaacttggcgtcttgggaagtggcggcagtggcgatagcctgccaagtgctggtggtggcggtagcctttctgctgttcccagtaacggagggacggataacacgagcagtgcgaatggtggtttagggggcagtacgctccagttgtcaccacgcacccaaggcaatggcagtgtgactcttcatgtgcagggcgataccgtcggtgtgtcggcggtggaggaaattaataccttgctggtccgtgcgactccccaagcgtggagatcgatacgtgatgtgattgagaagcttgatgtgatgccgatgcaggtacatatcgaagctcaggtcgctgaggtcagcctcaccaaccagctcagctatggtgtgaattggtttttccagaattctgtaaatgctgctgctgatgcggcggataatggcgcttccaacgggacaggcattggcctaggtgcgggcttgcctagtgccgctgggcgttcggggtggaagagcatcgccggtaaggtcaccagcaatgggttggcttggacgttccttggaaagaacgccgcagcgattatcaatgcattggaccaagtcacccaggtccgtttgctacagacgccgtcagtattcgtgcgtaacaacgccgaggccacgctcaacgtgggtgcgcgtattccaatcaattccacctcaattaacaccggtctgggcagtaacagtacctactcctcagtgcagtacattgataccggcgtcattttgaaagtgcgtccgcgcgtgactaaggacggaatggtgtttttggacatcgtacaggaggtcagcacccctggttcactgccagcggcatgtagctctgctagttcgacgttggttaacagtgccgcgtgcaatgtccagatcaacacacgcaggattaagacggaggcagcggtgcagagtggcgatacgatcatgcttgctggcctgatcgacagtaatagcggtaaaggcagcaacggggtcccgttcctgagtaaggtgccgatagtcggtgggttgtttggtacgaaggcgcagaataataatcggcgggaaatcattgtgttactgaccccagagattgtgcgtaaccctcaggaggcgcgtaatcttactgatgaatacagtcaaaaattcaatgcaatggagccattaccaggattgaataccaaatgagcttgatgttgggaaactgctgctggtgccatgtttcccaagaagttttaatgccaatcaatcaggccatttcctcgtttggtatgagggtatggcttggcggcaatatcatgttatgaaattgtctttttatggttatattttttaattgatttatattgaatatattaaaataattaatcacgtttttgtgatcaacatatcaaagaatattgattcatatcgctagtatcacgattatgatgttattaatgaattacagtcattgatctattcgatgttgattatgtttaatgcttgatgttgttttgaaagttaaggagaattcttatgcaagttaatattacgtttttttctatccctttgggtaaactcatagggtgttggcgtattatgtcatttggatcattcaacggaatgatattgtgcatttactgattacttcgtaggcgattggcttacgctaatcggtgatattctgaaattcaagctcaaattgtagttttgctacgaatagtttattcgtggtgtccgcccactgtggctaggttagtaacgaaatacgatttttaagatatttaaagtgtattgcctaatacgtgggtgctgatgctgctactacaaattttcttctttatttattaaggagggtcgctatgcgcgttttcatttcactgtctgctgatattgctgcagataagatgaagagaactttttcatcaagtccaaaatatataaccgatcagttatttcttgatttaggcaatctgggtcgagtactggagggtggatcatggtatttatagctccatatagtagtaaaccgcatgggaaggaaccgctgcatactattttatttgtggcgttgtcgctgtcgcttccatatactgaaaaagctaatgcgcaagtttatattaatgatggcatggatgggggatgccaaaggatagttgataacggaagcgcatcaggtgttgagcggacagtagccactcagtgtagtgaagatccgtggactgtgacgggttacgctcgtttcttcggtccctctggaactgctgccgagcagcaaggagcatcaagaaatcttacgctgggcgggtctttgtatgtcaattcgggtcaggtcggtgttaatgacgttttaaataaaacgtattcgatccgtatgggcagtgtgataaccatgaacactgtggcgggaaccaacgcaattgcgattggttcggcgcagagtagtgccgctgatgcactgaaagcgagcttggcaaccaaagcaagtggtgcacgtgcaattgcgattggtgcgaaggcgtcggccgatggtgtcgatacagtggcattagggtctggagcaacggcgggtacgggtgcttcttcgattgctattggtcttaatgcctcggcagtcaatggtgccgttgcggttggtgggggagcgctggtgacggtgccagatggagcggtggcattgggattgaactcggttgcttctactggcaagggtctctcagggtacgacccaaaaacaaaaacgacttcgacggacgcttcagccgcctggaaaagcacactggcagcagtcagcatcggtgatgtatctagtaccaatcttaagacgcgccagctttcaggtttggcagcaggcacatcaaataccgatgcagtgaatgttgctcagcttaaggtcgttgacgagattgccagtagaggctggaacctcacagcgtccggggccaacagtggcaacgtagccccaggaagttcggtggacctgaaaaacaccgacaaaaatctgacgattacaaaagcgatcggaagtaatgatgtgcaattcaatctgaacaaagatgtcaaagttacaacattggctgttggtgatgctttgctgaataccgatgggatcgcgttaggcactgatgtctcgttgagcacgacgggtttggcaattaccgatggtcctgcggtgacggcatcgggtatagatgcgggcagcaaggtgattagccatgtggcggcgggtgcggtgtcagagacgtcgaccgatgcggtgaacggatcgcaattgaatgcggtgcaagtgcaagccagtcaaccggtgacgtttactgggaatgaaggtgcggtgaaacggagcctgggtcagtcggtcgtgatcagtggggagagtagtactgcggggacgtattcaggtgggaatttgaagagtgtggtggatgaggcggcggggaggatccatttacagctggcggattctccgaagtttggcaatgtggtgatcaacaacggtggcaagatcagcggggtgacggctggtacggaagagacggatgcggtgaactttagtcagttgaagtcgatcagtacggcggtggatcaggggtggacgctgacggcatcgggttccaatgggagcaaggtggcgtctggcggtacggtggacctgaagaacacggatgggaatctgacgatcagcaaatccggtgatagcaatgatgtggtgtttaacctgtccaaggatttcaaagtggatgggatgacctcgggcaccacggtggtgaataacgatggcgtgaaggtcggtagcgatgttgcgttgggtacgacgggtctgacgattaccgatggtcctgcggtgactgcgtctggtattgatgcgggcagcaaggtcatcagccatgtggcggcgggtgtggtgtcggagacgtcgacagatgcggtgaacggatcacaattgaatgcggtgcaagtgcaagccagtcaaccggtgacgtttactgggaatgaaggtgcggtgaaacggagcctgggtcagtcggtcgtgatcagtggggagagtagtactgcggggatgtattcaggtgggaatttgaagagtgtggtggatgaggcggcggggaggatccatttacagctggcggattctccgaagtttggcaatgtggtgatcaacaacggtggcaagatcagcggggtgacggctggtacggaagagacggatgcggtgaactttagtcagttgaagtcgatcagtacggcggtggatcaggggtggacgctgacggcatcgggttccaatgggagcaaggtggcgtctggcggtacggtggacctgaagaacacggatgggaatctgacgatcagcaaatccggtgatagcaatgatgtggtgtttaacctgtccaaggatttcaaagtggatgggatgacctcgggcaccacggtggtgaataacgatggcgtgaaggtcggtagcgatgttgcgttgggtacgacgggtctgacgattaccgatggtcctgcggtgactgcgtctggtattgatgcgggcagcaaggtcatcagccatgtggcggcgggtgtggtgtcggagacgtcgacagatgcggtgaacggatcacaattgaatgcggtgcaagtgcaagccagtcaaccggtgacgtttactgggaatgaaggtgcggtgaaacggagcctgggtcagtcggtcgtgatcagtggggagagtagtactgcggggacgtattcaggtgggaatttgaagagtgtggtggatgaggcggcggggaggatccatttacagctggcggattctccgaagtttggcaatgtggtgatcaacaacggtggcaagatcagcggggtgacggctggtacggaagagacggatgcggtgaactttagtcagttgaagtcgatcagtacggcggtggatcaggggtggacgctgacggcatccggtgccaatgggagcaaggtggcgtctggcggtacggtggatctgaagaacacggatgggaatctgacgatcagcaaatccggtgatagcaatgatgtggtgtttaacctgtccaaggatttcaaagtggatgggatgacctcgggcaccacggtggtgaataacgatggcgtgaaggtcggtagcgatgttgcgttgggtacgacgggtctgacgattgccaatggtcctgcggtgactgcatcgggtatagatgcgggcagcaaggtcatcagccatgtggcggcgggtgcggtgtcggagacgtcgacagatgcggtgaacggatcacaattgaatgcggtgcaagtgcaagccagtcaaccggtgacgtttactgggaatgaaggtgcggtgaaacggagcctgggtcagtcggtcgtgatcagtggggagagtagtactgcggggacgtattcaggtgggaatttgaagagtgtggtggatgaggcggcggggaggatccatttacagctggcggattctccgaagtttggcaatgtggtgatcaacaacggtggcaagatcagcggggtgacggctggtacggaagagacggatgcggtgaactttagtcagttgaagtcgatcagtacggcggtggatcaggggtggacgctgacggcatccggtgccaatgggagcaaggtggcgtctggcggtacggtggatctgaagaacacggatgggaatctgacgatcagcaaatccggtgatagcaatgatgtggtgtttaacctgtccaaggatttcaaagtggatgggatgacctcgggtaccacggtggtgaataacgatggcgtgaaggtcggtagcgatgttgcgttaggtacgacgggtctgacgattgccaatggtcctgcggtgactgcatcgggtatagatgcgggcagcaaggtcatcagccatgtggcggcgggtgcggtgtcggagacgtcgacagatgcggtgaacggatcacaattgaatgcggtgcaagtgcaagccagtcaaccggtgacgtttactgggaatgaaggtgcggtgaaacggagcctgggtcagtcggtcgtgatcagtggggagagcagtactgcggggacgtattcaggtgggaatttgaagagtgtggtggatgaggcggcggggacgatccatttacagctggcggattctccgaagtttggcaatgtggtgatcaacaacggtggcaagatcagcggggtgacggctggtacggaagagacggatgcggtgaactttagtcagttgaagtcgatcagtacggcggtggatcaggggtggacgctgacggcatccggtgccaatgggagcaaggtggcgtctggcggtacggtggatctgaagaacacggatgggaatctgacgatcagcaaatccggtgatagcaatgatgtggtgtttaacctgtccgaggatcttaaagagaaaagtataacggtgggtaacactcagctggacaaggatggggtgaaggtgagcagtaatgttttgctggattctaatgagttagtgattacgagccattcatccacttcatccgtcaagactttggcaaatggagaaagtgttgttaacaggacggttgtgaatggggatggtgtgaatattgatgatgttgttgttgttaatgatcttgggttatcaattgtcggtggggcatcgctcacgttgagtggtatcaatgctggcagccataagatcaccaatgtgacggcagggacggaggatacggatgcggtgaactttagtcagttgaagtcagtcagcgaggcggttgataaggggtggacgctgacggcgtccggtgccaatgggagcaaggtggtgtctggcggtacggtggacctgaagaacacggatgggaatctggcgatcagcaaatccggtgatagcaatgatgtggtgtttaacctgtccaaggatttcaaagtggatgaggtgactgcaggcaatacggtggtgaacaccgatggtgtgaaggtgggtagcgatgtttcgttgggtgcaatgggattattcatcgctaatggaccttcggtgacggcttcggggttcaatgcgggtgacaaagtcatcagccatgttgcagtgggtatggcagatacagatgcggttaacgtcagtcaactgaagcaggcagtacagagtgtgactgtcaaagcgactcgctattacagtacgaatgatggtggcacccagggaggtaactatgatggtgatggtgcgacaggcagtaaggctatcgcggccggtgttggtacgcaggcatctggtgaaggggcggcagcggtgggatctggtgctgctgcgagtggcaaaggttctacggcgattggccgtaatgcgattgctagtgccgatggcagtgtggcgttgggtgatggtgcaaaggatggtgggcgtggtgcagaaagttacaccgggaaatattcaggtgtacagaacaatacggtgggaactgtttcggtaggtgatgctgctaagggggaaacccgttcgatcagtaatgtggctgatgctaaggaggcgatggatgcggtgaatttgcgccagcttgatgctgtggcccagaagtcaaatcttcaaacggatgatatgaggcatgagatcaataatatagaggatgttttcaagatcactaaaggtgacagtgcttcaagtgtcaaagggatgggggtcaatgcgatggccattggtaccaatgctgcagtttcgggtacagagagtgttgcgttgggtaagaatacgaatgtgtctgctgataatgcggttgccattggtaatggttcagtagctgaccgcgcaaacagtgtttcggtgggatcggggggttctgagaggcaggtgacgaatgtggctgcaggcactgctgatacggatgcggtcaatgtaagccaactcaatcaaggcttgatcactgccaagcagtacacggatgggatggtagggaatctccgtagggagactagcgggggtgtggccgcagcgattgcgacggcaaatctcccgcaggcttatgttcagggacgagggatgacctctgttggagtcagtagttatcagggtcagtcggcgattgcggtgggtgtttcagcggtttctgagagtgggcattgggtgttcaagttcagtggtagtgcgaatacccgtagtcacgtaggtgtaggtgcaggtgtgggttatcagtggtgagtgcagtttgtggggcggggagtaattctccgccctacctcagggtgttgtgtgtaacgctttgggtgggcaatgtagccagattgctgtgattgttcggttgggcaactggattttttagatgttcacgtgatcattgctaagtaaggctagtcgaagtcatggattccatgaaggacgaatctaggtttgttactcagtggttggttatgtggtctgtttattgtcaatgaacaagtgtggtttttagcaaggcggtaagggagtgtgggcggttaatattatagcttataactatcaatttcatccattcaattaatttgatgaatcaatgaggggtgcttaagctatatatcattctgagttctacactttccgccaccaacaggaaatactcaatgtctgttctcaacactgaaatactttcattcaaggcgactgcttacaagaatggccaattcgttgaagtttcggaggcggttctcaagggaaagtgggctgtgtttgttttctatcctgctgattttactttcgtctgtccgactgaactggaagatttggctgatcattatgaggaattccagaagtatggggttgagatatattcggtttccacagacacgcatttttcacataaggcttggcacgatatttcaccagcgattggcaagattaagtatgcgatgatcggtgatccgacgcatgagatcagtcggaatttcaatgtgttgcgcccaagtggtttggctgatcgcggcaccttcatcattgatccgcagggtgtgattcagtcggtggagattactgctgagggcatcggccgtgatgcaaaagaactcttgcgtaaggttaaagctgcgatttatgttgccaatcatccgggtgaggtttgcccagctaagtgggaagaaggcgggaaaactctggcaccgtcgttggatttggtcggtaaaatctgaattgggagacatcctcggcccacaacacggtcgaggatgatttcatgaactaaaaagctggtattccgacgcgtcttttgcgtcgcagttttgtatgtggggatatatttgctgttgattccctttatgtatccccgtcggcgatttgccgtgcagcgacgccgtgtgcttttaatcctcctctccaggagatagttatgtttgatgaaagtttgaaggctcagcttaaagcctatttggatcgggtgattcgctccattcatattcatgcttctgtcgacgagagccacaagtcgcgtgagatgctcgatttactcgaaaacattgtgctgctttcgggcaagaaggtcgttctggaggtgcatcgtgacgatgatcagcgcaagccatcctttgggttgggtacgccaggagagagtatttcgatacgttttgctggtttgccgatggggcacgagtttgcttcattggtgcttgggttgttacaggttggtgggcatcctcctaaagtggctgatgatcttattgagcgggtacgtaacctggatggtcattatcgttttgagacctatttttcagtttcttgtcagagttgcccggatgtggtgcaggcactgaatatggctgcggtgttgaatccgcagattgagcatgtggctattgacggtgcattgttccaggatgaggttgaggcgcgccagattatgtcagtaccaacggtgtatttgaatggcgagctgtttggtcaggggcgtatgacgttggaacagattgttgccaagcttgatagtggtgcggccaagcgcacagccgagagtatccaggctaaggctgcttttgacgtgttggtggttggtgccggtccggctggtactgcagcggcggtatatgctgcgcgcaagggggtccggacgggtttggtcgctgagcgctttggtggccaagtgttggataccatgacgatcgagaacttcatatctgttccggaaactgatggcccgaggatggttgcggcgctggagcagcatctgcgtcagtatgaggtcgatatcatgaatttgcagcgtgtcgagacgttggtaccggctggagagaacggctttatcgaggtcagattggccagtggtgcgtcgctgagcagccgcaccgtgattctctctacgggtgcacgctggcgccagatgaatgtgcctggtgaggatgagtatcgcaacaagggggttgcttattgtccgcattgcgatggcccgttgttcaagggtaagcgtgtcgcggtgattggcggtggtaattcgggagtcgaggcagcgatcgacttggctggaattgcttcatatgtcacgttgcttgagttcgataccaagctgcgtgccgacgaagtattgcaacgcaagctacgcagtatgtcgaatgtggaagtcatcatgggtgcccagaccaccgaggtacgtggtgatggaaagaaggtgactggtttggtctatgttgatcgcagtactggtggaagctttacattggcgttggaaggcgtgtttgtgcagatcggtctgttacccaataccgagtggttgaaaggtagggtggaattgtctccccgtggagaaattgtcgttgatgaatgtggtcataccagcttgccaggtgtgttcgctgctggtgatgcgaccacggtgccgtataagcagattgttattgcgatgggggagggatctaaagccgcgttgagtgctttcgattatctgattcgtaatgtggttgaaattactggaattgctcaggcacaggcagcgtgagccaatgcagtacagcggtttaactttatgttgcttagtcttgatgttgttgcaatacctaagtgtggaattacattccctcccttgccgcgaggtttggctttatgaacctgcgtgacttgaaatatctgattgctctggccgattacaagcactttggccgtgctgcaactgcatgttttgtcagtcagccgacgctatctacgcaaatcaagaagttggaaggtgagctcggcgtgtcgttagtcgagcgtgcgccgcgtaaggtcatgatgaccccggctgggcgcgaagcggcgatccgtgcgcgtagcattgttgccgaggttgaggaaatgaaggaagctgcgcggcgtagccgtgatccggaggctggtgctgtgcgtttgggtattttcccaacgctcggtccgtatttgttgccccacgtagtaccgagtatccgttatcgttttccacaattggaactgttgctggttgaggagaaaagtgacgaattgctcgcacagttgcgtgaaggtaagttggatgcagcgttgttggcattgccgttacatgatgaacaattgcacaccgaatttttgtttgaggagccgttcgtgttggcagtcccagaggggcatccgttggctacacgtcgtgagatgacgatggaagaattagccgacgaacgtttgttgttactgcaagatggccactgtctgcgtgagcaggcattagatgtgtgccatatgactggtgcatcggagaagtcggagtttcaggctacgagcttggagactttgcgacagatggtggttgctaatgtgggtatcacgctgctgccgttgctctcagtcaagccgccggtagtctgttcggaaagtattcgtctgattaattttcctttggacaaacagccgagtcgccgaatcgctatggtgtggcgacgcagttcagcgatgacgacatttctggagcggttttcgggcatgttcaaggagttgccaaaggagttgtttgacttgcctcagaccgtggtgctgtacaaaggtcggtagcttttccggtcgtgtcggagttaagcgcgagtctgtgggttcgttacccgttgttattttggagtcagggatgcttggatgttggtgttaagattgcgtgattatttaaggtctcttgctctttcatgaagctgcttgctttcgaaacgtccactgaggcatgttcggttgccgtgcaggtcgatgggtgtgttttggagcattttgaaattgcccctcgtcgccatgctgaactcgtattgtcatgggctgagcagcttttggtcgaggcgggcatcagtcgtcggcagcttgatgcgattgcacttgggtgcggcccaggtgccttcactggtgtacgtctggggatcagtctggcccaggggattgcgttggctttggataagcctttattacccatctcgactctgcacgtccttgccatgcgtgccttgcccgaggcaccacgtgtgctggcgaccattgatgctcgtatgggtgaggtatatgccgcaattttcgtgcgatgtaacggcatactggtgccgagtgccccagaaggggtttgcgtaccggatagcatcgtattaccgggaagtgatcgtgattggcatgcagtcggtaccggccttgcagcaagtcatggcttactgcagcggtgtctggcgtcgcggttggcagctactgatgcgcttgctatgccgcacgcagttgatgtattggctttggcaatatccgcgttgtcacgtggcgagggtgttgctccagaatgtgtagagccagtctatttgcgtaataacgttgctcttactctgagtcagcagcgtgctatgtaggtgtctgattgagtagtgtgtctgcatgttaccgcagcaccttctgctctcaatcgctgttgaatacgttcagctagccaatttgcgatatgggcaacttcggggcaggtgtgttcatgaaacaaattattgtgagtaagtaaagagattgttccgcttgtgtctttggttgtacaaaactctggaattgatggctttggtttaacttttgagggctaattcaactcatgagcagatctcatatgggtttcttgcatttccgatgttggcatgactacacttgcagccttatctagcagctcttacggtgtgagctatgaagcccgaaattcatccaatttatcgtgaagttgtctttcacgatgtgacttccaatttcaagtttctcacccgttccaccatgagtactaaggaaactactttgtgggaagacggacgagagtatccgttggtcaaggttgaaatatcctcggcctcgcatcccttttatacaggtaagcataaacttgtggacacgagtggtcgtattgataagtttaaaaagcgttacgcacgttaagttgcctatttttttatgtattttgcgattcacgcagattgcgtgagcgctttaaggataacccaagaggcggatctataagcgcttaactattaaggtggtttcctttgcatacatctttttttgtggatgtctgtaatagcttaagcgcattattctttgatacctaacaaccgcccttacggtttgccgtttgggcgtctttccattgttaaggagcccacgctatgtccgatcttgataaggtcacgctcaatgccggtgagacttctctcgttttaccggttttgaaacccacgttaggtaatggttgcgttgatattgccaagttgacaaaggaaaccgggctgtttacttacgactctggttttacggcaactgcaagctgtaagtctgccatcacttacattgatggtgaaaagggtgtgttgttgtaccgcggctatccgattgagcagttagctgagcactccagttttttggaggtcgcttatttgttgatgaacggtgagttgccgagaaaagacgagtttgccaagtttgatgatgaaatcacgcatcacacgatgatgcatgagtcgttgaagaactttcttggcggttttcattatgatgcacatccaatggctatgttggctgcttcggtggcttcgctgtcggcgttctaccacgatacccttgatttgaacgatcttgagcaacgtcgcttagctgcaattcgtttgatcgctaaggtgccgacgcttgcagcagcagcgcatcgctactcgattggctggccgatccgctatccacgaaacaatcttggttatgtcgagcgctttttgcatatgatgttcgaagtgcctagtgaaccgctgcagttgaatccagttgtgaccaaagctctggatttactgtttattttgcatgctgatcatgagcagaacgcttcgacatcaacagtccgcttggtgggttcgactggtgctaatccttatgcatcggttgccgcgggtatcaccgcgttgtggggaccggcacacggtggcgctaatgaggccgtgttaaagatgttggaggagattggtgatgctaagaatgttgacttggttattgcaaaagcaaaaactaaggacaaaaactctccattccgtttgatgggtttcggccatcgtgtctataaacattttgatccgcgtgcgaaaatcatccgtgagatggcacacacagttcttggtgagttaggtgtgaacgatccgctactggaagtggcattaaagttggaagaggcagcgctgaaagatgattactttgtgcagcgtaagttgtaccctaacgttgatttttattcgggcatcatctacaaagccatcaacattcctttggaaatgtttacagtgatgtttgccatcgcgcgtaccgcagggtgggtttctcattggcttgagcagcaagtcgacccggagatgaaaatcagcaggccacgccaaatttacacaggtcatggcgagcgtgactacaaagatgctaggtaaagagtaaagagactcttatatcttccaatgtgcttctcagatgaaggagctattgtggatgcctgacgagatcgcgggtaataacccgaatgaccgaccaggaacagcgcctcaaacaacgtgaggtgctgacaatgtatagatggaccaactcattccaatgagctattccccgagccgagaactgctcggatcgcggggaagggagctttatagcactaacgcttagaaaattgggtggcgcggcgggctttgtggaggcctactttcttgcgttcgacttcacgtgcgtcacgagtcataaagccagccttacgtagctcaggtttcagtgacgcatcatattctactaatgcccttgcaataccaagacgaatcgctcctgcttggccagttgtaccgccaccggttgcagtgattagaatatcgaagtttgcgacgtttttggtcaattcaagtggttggcgaacgatcatgcgtgcggtttcccgaccgaagaactcatccagcggacgaccattgacagtaatattccctgaccctttacgtagaaatatgcgggccttggaggatttgcggcgaccagtgccgtagttttgtgtgataggcattgatttatatgtccagaacttgtggctgctgcgcggcgtgtggatgcttggagcccgtgtagactttaagcttgcggtacatagcgcggcctagcggccctttcggaagcatgcctttgactgcgatctcaagtactcgctccggatggcgttgcagcgcttgtccgaggctctcactcttaagattgcctacatatccggtgaagcggtggtaatacttatcagtgagttttttgcctgtaacaacgaccttctcggcattaatcacgacaagataatcgcctgtatcaacatgggtagtgtagacaggtttcgttttgccgagtaggcgtcgcgccaactctgtggcaaggcggccgagggttttgccttcggcgtcaacaagataccagtcgcgctggacggtctcgttttttgcagtgaacgtagtcattaaggaagcttaatatggttgtcgggctcattccaccggatgcgctcgaaggaactctgccgcgcgttgttaaaattatttgttggaatacaacaaaagttgttggaatagtttttggaattacaaaaaacttattggatcctacttgaaggttggcattatgtgcaagtaccaagtacggtgttggcaagagaatagtgatgctgtgacaatgttgcacatggacgttattctttcgacacgccaccacagccatctggattcattgttgatagaaactcagcgtgtgttggaggtggttttcggtcatccagttgcgcagcgtcccagtcctgccaacgcttttcctaatccgttactgtcccccaaagatcgtcggcatgctgcgggactcatgcgaatcaatcatgttggcgagatctgtgcccaggggctgtactttggtcaggttgcggttgcacgcaaggaggaattgcgtcggcacttgttgaaagcggctcaagaggaaactgaccatttgtcttggtgctcagatcgattgcatgaattggagagcaggccaagcttattcaatccgctttggtactctagtagttatatgttgggtgtttttgctggattgcttggtgatccgtggagtttggggtttgtggtcgagacagagcgtcaagttgaggcgcatttggagaaacacttgcaggttcttccggagagcgatgcgcgtagccgcgagatcctccgtgtgatgaaggtggaggaggcccgccacgctgaccaagctgaccacgctggggcgcgtttgttaccttcaccgattccaggggcgatggcgtgggccgcacgcctgatgaaagtcgtcgcttaccgaatttgagcttgggacatgactagtcatgctgattatctatatttgattcggcttggttttgtcttcacttcccctaatattgacgtagaagcgtgctaaggcgttgcgcatgactcacaaggagaaaacaaccctgacatgttcacaggccttgtcacgaagtccccaaacgcttattcggccaaattgcgtccgtgaaataactcctcaatttcaagtttgagcaaagcttcgattttcatgcgttccttgaatgaaagattcctggctttttcttcaaacagatactgatctagatcaaagtctttcaaatgcatttttgtgtgaaagatattttcctggtacacgttcacatcgaacatttcgtagcgtgacttgatgcttttggaaagaaagttctggatcgagttgattttatggtcaatgaaatgcttttttccctttacgtcacgcgtgaagccgcgtacacggtaatccatgatcacgatgtctgactccagactttcgatcaaatagttcagtgctttgagtggggatatgaccccgcaggttgccacgtcgatatccgcacggaaagttgcgatcccttcctgtggatgggtctcaggataggtgtgaaccgtgatatgactcttatccatgtgcgcaaccactgcatcggagatcaattctttgccggcttgctttttatcaattaccggctcttcggagatcaaaatggtgactgaggctccttggggatcgtaatcttgtcgggcgatattgaggatgttagccccgatgatctcagccacgtcggttaagatctgagtcaggcgatcagcgtcatagcgttcgtcaatataatcgatgtaacgctgacgctcctcttcggtacgtgcgtagcatacgtcgtagatattgaagctcagcgccttggtgaggttgttgaacccttgtaacctcaggcgaggcaatggcttgaccatgtcggtcgatcctggaataagtagagaaggggaagaagaaattatgcggcaaagttctcagcagcgaaatgccattgctagtgacggtttacgcgtggcaatgaagaccgctaagcttagcggattggaatgcggacctaatatgactatagggaacactacgagtgtgacaacggtacgtaacgctactccgcctttagctctcgacaatgcggcgatcgagcgcttcttggctcactgtcatcgacgccgctaccccaaccgaacggatgtgtttaggcctggtgatcctgctggaacgctttactatgttatcagcgggtcgatcagcatcattgccgaggaagaagatcatcgtgagctgattcttggctatttcggagcaggtgagtttgtgggtgagatgggtttattcatcgaatccgatgctcgcgaagtcatcttacgtacccggactcagtgtgaattggctgaggtaagttacgagcgcctgcaccaactgttgcaaggcagtttggcgagtgatgcgccgcggattttgtatgcgataggcatgcagttatctaagcgtttattgcttaccacccgtaaggcgagtcgtctggcttttctggatgtgggggatcggatcttgcgcaccttacatgatctggctcgcgatccagaggcaatgagtcatcctcagggtacacagttgagggtgtcacgtcaggagctggcgcgtctagttggatgctcgcgtgaaatggctggacgtgtgcttaagaagttgcaagcggatggactgttacatgcgcgcggcaaaaccgttgttctgtacggaacgcgttgacccggttcctatcaagtgcacagtgctgggcgatactcggtaccgtgcatgagctgtataccgtttcatacagagaaaaaagtgggaatatggattgaactttgtagaggagatcaagaaccatgcctttgcaaagtactctgctcctttctggcagtgctatctgtatctttatcttgtttttctgattccactctgttttaacctaattgctgcaattaatgtcttgcaatacatacatgtgatgctcgattcgagcatcatctgaccgtgcgggtaattccgcgcatcggtattttgagctgattcgtccttcttctgggcccttgtaccgttccgtctggtaggtatctccccgcctgactaagggaggctttgtgtggtctagaggcttctcgtgcagaccatttggccggtcacggcagcaattggaacgatgttgtttccatattcagcaagctgtccttagcagcgcattgcagcgtagttgctgctcagtcttatcggacaggaaaatcctgttttactgaatacgacagcggcctgatcgttcagcaaatgctacagcgcccattctgaaatcagcccggatatttttttgaaataactctcactttctcacttttgaaaaaatagtgatataaataccttccaaggttttgctatgggtgttggtattggtgcgtgtcttgcgttttttcgccggcggcccgattggggcgattgcaggcgcggtgagtggcggcatgcacggcgcgatgatgggacttaaattcggattgatctccttcaaggggtccaggacccgttctgggcccctcttggtattgtgcgatgcatgcaaagggaaatattcatgaagattcacggtttagatcagaagtcttacatatgctgtttgtgtggcttgattgtgatgtttgttggttctgttggcgataaaaatgcttctccagtgacaaggcgtgtcaatattgcctcatgtcgtctggatgcagtgttgcagtgacgaatatctgcctgtgtggtgccgctggtctatgactgaatgcggcccaggctccatcattgatctacatcttttagcaacgtggcgttgcagcgcttttctatatccccccgtgtggaaagcttggtcaatataagtttcccgttgtacctgccgaacctggaattgaattgccttgagagattcggtgcgtaaggcatggatttttattgtgactttattcactttttagtaatcgcgtgtttgtgtgttatttcgttaccccgcaagtacagcgcaatgaacaagagcgaatgtgaatccttacttatcttttctttggtgtgagtaacatctcaattgctttgccagttgcagcaaaggcaaatgcaccagtgacgtgagttgctgcgccaagccctgtgctgcaatctagattcagtgctgcgttgctgattaatgatggtcgtattccacagacgctaccgtcagcttgtggatatttcacattctccaatgaatacactgcgggcacaccgaaatagcgtttcggattcttggggaaattgaattcgctacgcaatttcttacggatcaaagcaagcagcgtatcgtgttccgttcgagagatatcgcgtacccgcactagagtcggttcagtacgtccccctgcagcgccaatggtgatcagtggtcgtttatggcgccgacaggaaacgatggtttcaactttgatccgaaagctgtcgcaagcatcaataatcaaatcgaaattttccccaagcagtgcttccatgttgttccctgccaaaaataactctgttgctgacacgttgatcctgggattaattgcacggcaacgttcaaccattgcctgcgctttgttccgtccgtattgacctatcagtgcaggtagctggcgattggtattggagatacagagatcgtctgcgtcaatcaagctcatgtaccctatagccgagcgtgcaagtgcttcgacaatccacgaaccgactccacctattccgatgaccgccacacgacatgtcgacagccgtgcaaccgtgcctaggccatatagccgatcgataccggagaagcgttcgccccagtgttcatccctcaggtcatgtatttccttgtcttgtctctctaccactcgattccccctctaaagggtgttaaatatttctatagatgtttttgaaaggagtaagctgctcagttgcagctgttgccatagagcgtctatggagttgcacaggtctttaatatggatgctgttatgaggcttattgctgagtggagagcgctcatttcatgagttttcctcctgggagaggagttgccacaacgctctgcatttcggttttggccaatctgtgcgttcatttttcctatctcgatggtgcttgccatgtgtcaccatctacggattgatcgttaggggtatggagtacgtgttgcctatggggtgatgtaaagaggatggcttactaaaagcaatacctacatgctgtcccggatgtacaaacgtttgcatacgatttgatagtgctttggggaaacaactatctaattggaaaagtccagggcattgatacggtgctgggggagttgtgtaaccgtgcaatcatatcgatatcacgctctgttccactcgtggcgctaggtcagttatactctcggatgcttgctgatacaggtaatgcatgaatggcgcgcttctcgactgagtcggcccacagtgaaagatacacatgcattaagatgcttacgccactttgacctaaccgttaccatccgccttttgccatgatttccgttatgttcatctgtctgtgtggaggatcgtggggcggctaggccgttttatttaatatggagaactgacaatgaacatgcgtgtcctcccctttgctctgcttgcaactgttactgtagctggttgcaatacagctcggcttggttatggcggtgggtatggtgggggttacaaccaacagcgttgcattgactgtggtgttgtgactcgaatcaatgtggtgcagtccaaccgctctgctccgacgggtgtcggtgctatcatcggtggcgttgttggcgcagtggctggacgccagatctccaagaagactggaggaagtaaaggtaatcaaaacatatccacgttgggtggggttgctgcgggtgctttagcgggcaatacgattcagaacaatgtcaccaaagatagctacgatatccaggtgcgtatggacgatggccgcgtgattgtggtcaaccaagctgatttgggtggtgtcactgagaaggcttacgtgcgcttggttagtggccgcgtggtgttgcgttaatgcataaaggtttgccagtatccctttctttcgcatgatttactgtaatgtttgcagatgggaaactccccgttaaagcagttctaaggaaagccctctgcagagggctttcttttgtgtgtaatgagcataattaaggggcatagcttttagaccatacagtataaataatggttaaaagatggcatctatggatctaaacagaaaagaatgatcacggctcatgtggttgcaatcgattatatttaacggtttgcattgagtttctgttttgatttattggtaagtaacgatcttctttatttaagattgattcattctgaggttcctggaaagtgcttataaagaatttgtccaatgaatttttgaataattagcggaaacccagcactggggtctcacttctcgagtctctgattactttatggttgtttgtcgtctcatgactgctcaccacttcatagcgatgtggcattcagtattgtctttatcgctgtaatgtttgttctgccatgacatcgtggcattggattgacaggcagcgtgttgagattgccaagttctacctgatttcaacacaattgcttggtgacagaagcatctgcagcttgtcatagcttgattggcagggtgagacggtaagtttgattgaatataaatataaaacagttttttgaaatttatggtggtgctacctaagttaaattctttaatctgacaatctatcttcaaaggttacattctttctggagccattaatcggattgttgaaaatgctgtgtatttattttttctgaataacgcatattttctgtcaaagtagccagaatggcattgtattcattaacacagcagtgttagtagccatgataatgctttatttccgtagtgtgctgttttgcatcagcctgatgcaatcgttgtgtatgaacagaagtttattattgtctaaatgaagtggcagggaagggggtatcaggcgtgtgaatacagccactagattccatccttgccttagcggagatggttattgcttttattcttgacggcttaggaggacgctataggacgcagatgtgggtaaaaagtataaaggcatcgttctcgagtccgtagaacgatgcctaatgtgcggagctacttgagggagatcagtttgctttatggattgcgcgcttgctgaccgccatagctgcgtcgtggattgcttccgataaggttgggtgggcgtggcagatccgggcgagatcgtcagctgagccactaaattccatagccaataccccttcatgtaccaattcggagacgttcacaccgatcagatgtaaacctaacacgcggtcagtttccgcatgcgctaggactttcacaaaaccagatggctcagccatcgcaacggcgcggccgactgcggcgaacgggaaggatccagctttgtaaggaatgttgtttgctttgagttcttgctcagtcttaccaacccaggcgatttccggctctgtgtagatgacccatgggatggtttcaaagttcacgtggcctggcaggcccgcgatcaattcagctactgcgatcccctcttcgaagcctttatgagccaacatcgggccacgtacacagtcgccaatggcccagacaccgtcgacaccggtatgacagtgttcgtccaccacgatctggccacgttcgttgagctgtaccccggtgccatctgcaagcaatcccttggttgcggccttgcgcccgacagccactaatagtttgtcgacagtaaatgtctgcttaccggaggcgtcagtgtaggtaacgatgacttcttttttgttgtttttacttgagatttcggttcgggagaccttagcaccgagcttgatgtccagcccctgttgcttgaattccttggcggcggttttggcgacatcggcgtcaactgcagctagaaagtctggcattgcttcaagaatagtgacttccgcacctaggcgtttccatacgctgcctaattccagaccgatgactccggcaccgatcactgccaagcgttttgggacttttataaagtccagggcaccgatattgtcgacaatcgtttcaccgtcgaacgttgcaaatggcagttcaacggaatcggagccggctgccaggatcacgttggcgcctttcagttcgatgttcttaccctcgtgttgttttactttgactacgttgccaggttgcaattgggcaaatccatagtagggagtgattttgtttgctttgaagagcatcgcaatgccacccgtgaactgtttcacgattttgtctttgcgagcgatcatcgtggcaacatcaatcttggcatctttaaaactgatgccatgttcgttgaatagatgtcccatgttccagtactggcgggaggagtccagcagtgctttggaagggatgcatcccacgcgtagacacgtgcctccaagcgctggcttaccgtccttgccgagtgctgcatcgacgcaagcgaccttcagacccagttgggcggcgcggattgcagcgtgatagccagctggaccggctccgataacaacgacgtcgtaatgttcactcattgctgttttcctgttcttgtttaattgcaacgtcaatcaatgagtagttatcttgaccgctttttattttgtctatgtattcttggcattcttttttactcattcgtggataaatgccgcatagatcatttgcttgccgtcgataaatagatttttttgtatcactctcattgggatgtcgctgcttgaaataaatgtcttccaactggtggtagccagtacattgacgcagtaagtacaccagattttttcgcagatagtcgttttcaatcttgagtcggtctaagtcgtctctcaatttttcctttgcttcgctttcacgtgagactttgatgtgaccaaaggtattgatgattgcggcgacgacggttgctatcgcgatgactgtcgtacttataagagcgatcaatgttgcatccatgtgtgaatctcttccttataagccgaacagcatccgcccgggggcttccaattgatttttgatgtctaccaagaattgaaccgaatctttgccatcaatgatgcggtgatcatatgacagtgccacgtacatcattggcgcaatcacaatgtggccgttctcagcaatggggcgctctttgatggtatgcatccctaaaatcgcgctttgtggtgggttaacgattggagtcgagagcaatgagccaaaggtgccaccgttggtgacggtgaaggtgccgccctgtaactcttccaggcttaatttgccgtcgcgtgccttcttggcgtaatcggcgatgtgatgttcgatatcggcgaaagacatccgttcgacgttgcgcagtactggcgtgactaagcctttatcggtggataccgcgatcgaaatatcgctatatccgtggtaaatgatgtctgtaccatcaattgatgcgttgaccaaggggaagcgctgcagtgcattggcggccgctttcacgaaaaagctcatgaagcccaatttgataccgtgggctttctggaattcttcctgtaactctttgcgtatgtttgagactttggccaggttgatttcattaaaggtggtcagcatcgcagtggaattcttcgactgcatgaggcgttcggcgatgcgttgccggatacgggtcattgggacgcgttcttctaaacgcgtaccgctggcgcgggcagctccattttgcttagcaaagttgatgatatcttctttggtgacggcaccacggcgcccacttccttcgatctgggctgggtcaataccttcggtcgttgccgtgaaacgagcacctggaggcagactgtcaacgctggatttggcggctggagcggatacagcaaccggtttctgatcaatcaccggagagggtgctggagagggtgcagcaacgatgctgccttcttcaatgattgccagaacttgattgctggtgacagtactgccggtgtcgaatttgatttctttcaagacgccgtcgacgggggaggggacttctaatacaactttgtcggtctccaggtcgacgatgttctcatcgcgtttcacaatttcacctgcttttttgtgccagctggcaatggtggcgtctgaaacggattcaggtaataccgggactttaacttcgatggtcattctggatatgtcctagggattcttgttcttgtgaagtaatgattattcagcgagatgatcgttgaacggattcaacagtgcatcggcaacgaggctttcttgctcggccatatgttctgccatgtgcccgacggctggagagggagagcttgagcgaccagcatagtgaagcctctgagcatgtgccaatacggcttgtaggtgatgcttgatttggtaccacgcaccttggttttgcggctcttcctggcaccaaacgacatcggtagccttgttgaagcgtttcagttcgctggctagcaacgcacgcgggaacggatacaactgctcgatacgtatgatggctaagtcgttttggcttcgtttctgctggttttccaatatgtcgtaatagaccttgccggcacacataacgatgcgcttgacgtgtttagggtcagctgcatcgtctgggatgatgtgttggaacttaccgttagccagttcgtccaaagtggagactgccagcttgtggcgtagcagtgatttaggcgtcatgacgaccagcggtttccgcgtggacatgcgcatctgtcgacggatcatgtgaaatgcttgcgctggagtggtgggcacgcagaccagcatattttccagtgcacacaattgcaggaaacgttctaaacgtgcggaactatgttccggaccttggccctcataaccgtgcggtaagaatagcgacaggccgctaattcgaccccatttgacctcaccggcagcgatgaattgatcaatgaccacttgggcaccgttggcaaaatcgccgaactgcgcttcccagatacacagcgtgttgggatcggtggtcgagtaaccatactcgaagcccataacggcttcctcgctgagcagcgagtcgattaccgtcgcatcgtccgggttgctgaccagttggcgcagcggtagataatagctgtcggttttttgatcgtgcagaatggcatggcggtggaaaaaggtgccgcgtccggcgtcttggccgaccaagcgtagcttgtggccttcagccagcaacgtggcataggccaggttttcggcaaagccccagtcacccggctgttcgccagcagccattttgatgcggtcctcataaatcttggcgacacgtgggtgcaattccacagtggctggaatggtattgatgagtgcggccaacttgttcaacgtctgacgcttcacgctggtcttgaccgtatcgtccagtttgccggacagatacttggaccagtcgatgacgaattcatccgtgtgtttgcttgccagctcagtggtgaacttacctgagtccagtttggctcggtagtcatctaccattgctttggcttcgcctgccgcaatgaccccttcggcttctagcttggttgcataaagctcgcgggtggttttgtgcttccggatggtctggtacatcactggttgcgttgcagctggttcatctgcctcattgtgtccccagcggcggtagcacaccagatcaatgaccacgtcttttttgaattgctgacggaattcgtaggccagttgcgctacgaaaacgacggcgtctggatcgtcaccgttaacgtggaacactggtgcaccaatcattttggcgacatcagtgcagtatggagtggagcgagcgtcatcccgcgcactggtggtgaagccgatttgattattaatgatcacatgcagagtgccgcccactgcgaagccacgtgcctgtgacatctggagcagttccatgaccacaccttggccggcgaatgcagcgtcgccatggatcaggattggtagcacggttttgcgttctgtgtctccgaagcgctcttgacgcgaacgtactgaccctgcaacgactggatcaacgatttcaaggtgcgatggattgaaggcgagcgccaaatgtacttgcttgccatcgccgacggcgatgtcagccgagaagcccatatggtatttcacgtcaccggtgtgagcgcggtcgtgatgggcgtgctcgaacttgccctcgaactcgtcgaacaatttgcgtggatttttgcccaacgtgttgaccagcacgtttagtcggccgcggtgggccatgccgactacgatatccttgacatcattgttgccggcttgacgcaccaaggtgtccatcaacggaatcaatgtatcgctgccctccagagagaagcgtttctgccctacatatttcgtatgcagataacgttccaggccctctgcggcggtcagacgctcgaggatgcgtttgcggttggtcgcgttactagcaattttgccaccgacattttccagacgccgatagatccactggcgctgttcgaattcagagatatgcatgaattctgtgccgatggtatcggtataggttgcttttaagtgtgcgagcagattgcgcagcttcatccgtggctggccaccgatgccacccgtgctgaattcattgtcgagatcggcttgcgatagatgatgaaatggcagatctagatcgggcgggttacttggcggagtcagccccagtggatcgattcgggcactgagatggccacgtgagcgataagcggtgatgagacggccgatgttgcgttcccgttcgtcgcttgcgtcttgcctggacttggccttgacactttgcttggctgtgtcggtgatatgagcgatgaccgccgagtgtgggatgtcacctgcatcacgtcccttaaaaccgtcgaagtaagctttccatttgggatcgacgctgttgggcgagacaaggtattgctcgtaaagatcttcaatgtaggcggcattgccgccggccagaggagaggattgggtaaactgcttgattagattgtccacgatgcttagtcgggtcgatggggattggctacgtctgcaatgcacggatatgtctaggcgacgtcctagagtcactgaactgaattataaccctatgaatccttaaggaggtggtaattgcacgttccttcaatggattttatccattgctgacgtgctcagagcaagtgcaacgtgcagctgcttggggtttgttgcgatgtcattcgtggtgagtgaggctgcgtgattgctttgatgcttgtctaacgatgttctgcacacagtccttgtgtgatggtacgacgcgggatgtgtctctgtgtgattgattaacgagggtgagttttgcaccttatgtgtaaggctcttacatgctttttctcaaattagaattaatctgcttccggtacagacatgctttgcagctacgttatttgtcttgtgtcagcgttctataggaacagtacaagtcgactctgtattctgctgtgcaatgcgatttactctacatgcgctgtttatttcaatgtgcctgaacaggtgtttgaagagaggcggcttgcatgaccgcagcctcaatttagcgagacggtatcgttactacatatcaaccaacggatgacgcaatgtctccggtaacgaagatgccaccctgtttaaatgctcacgtatccgagcaagagagtctagtattacatcacttgtagtacgttcattctggatctcgcatgagggcaatttggaaggggttgttgtaatgcactgttgttgttcatcgcctcatattcaagtacttccgcaagcggcatcgtacagcagctcgtatttatctttggacgcgtgatccaaacgtatggatggccaggctgaagaagtgtgttgttggaaattgtgctgccatgtttccatgccggagacagtctgttattgaagttactttggggatgcttgagtgctgatcgccgattatttttgagttctcagtggtctgtgcgtccattccggtgttggatttacgtcgtttctgccatcgcaacgcgcagcttctatcaataccattccgccggttatacacagttttttgtgtggggatgcaggactcttcgtgtacagggctgtgatcgtgccacgatacattagctgtatcgtggcactcttcatcgctgtgcttcagcagtgtgctaagccatcattgggcatatggatatcaatcagtcttcgggacaggctgtcgcggaggaggcttccttgttccttgcatcgttgtccagagtgttgtcatcaagttggtagtggccttgccccacgagatcgaataatgcggcgcggccgcgttcggagagtgctgtgtaaacgtggatgtcgatgcgttcggcggcggccaagcgttgtgcatcctgagatgtaagtgtgaattccagaccactacagaacaatgtggcatcgcggctggcacggcgccaagcggtacgcgaccacggatgacgtatgagttcactaccgctggcaagggcatgttctaacgtctcacgctgtggtgttgtcgtgtcaggcacgatcgtgttggagctgcggtaagtggtgatgaaacggccgaaccaattgccgagttgctccggatcgtcgtgcatcctcaatgcgtccagcgcagcgatcgcacgatccatcgcggcggcgtcgatttcgtaggggtcgtcgggtcgtgtgaggcctgcatcttggtaacgtactgcctcgtccgcctcactgatgaatgtgtccagccagtcgctcattaactcggctgaagatggagcacgcatgcctaacgagtaagtcaaacatggatcatcggcgaccccgtgatgggggaccagtggcggcaagtagagcatgtcaccaggtgccaacacccattcgtgagttggagtaaattggcgcagcaatttgatgtctacgtcattgcggaaatccagagacggtgccttgcgacccatcgcgacgctggcgtcgatgtgccaacggcgatgcccttggccctggagtaggaaaacatcgtattggtcgacatgcgcaccaaccgagccgtgagtggcggcgaagctaatcatgatgtcatcgatccgccagcgtggcagaaagcggaaatgttccaggagtgcgcgcacatcttggtcccacttatctacatcctggaccagcagggtccaatcatggtcaggcagcttgggaaattcctcttcttggaaaggtccgtgacgtacctcccaggtgtcggtgttgcggtcgtgctggaccaggcggcagagaacaccctcttcgcaagccagtccggcgagatcctcgggggtcactgggctgtggaagtcaggaaacgcgttgcggatcagcagtgagcgcttttgccaatagtgatgcaagaaatattcctccggcatgcctaatggatattgatcggttgcttgaatttcaaacgggaataaagggacggagcgtttcatctgtattggatttgaaatgagtcagcgtgcgctgtacgtgttgtgcgatatgttcggtgcgttgaggctttttgaatgatcaattgatggggatatttgtgatgtgcggacggaatattctgggaaattcattgcaatgtatggccctacatcacgcttcttcgactgacttagatgttcagtgccaactgcttcgccaggccggtataagcccttggagttaaatcgtgcagccgctgtttggcttcggttggcagatccagcgtttcgatgaaagcgcgcatcgaatcggcggtgatgccctgaccacgggtcagcgctttcagttgctcgtaggggttgggtaggttgtggcggcgcatgattgtctgtactgcttcggccagcacttcccatgccgcgtccaggtcagcgtcaatacgttctggatttgggctgagcttgtgtagccctttgtttaaagaatctaaagccacctgagtatggccaaacgcggtgccgagtgcgcgtagtacggtggaatcggtgaggtcacgttgccaacgactgatcggcagcttggtcgaaaaatgctcaaataatgcgttggccacgccgaaattgccttcggcattttcgaagtcaatcgggttgactttgtgcggcatcgttgaggagccgacttcaccttccttgagcttttgtttgaagtaacccaacgagatatagccccaaagatcgcgtgccaggtcgatcagaatggtgttggcgcggcgggttgcgtcgctgatctcggcgatggtgtcgtgcggctcaatttgtgtggtgtatgggttgaagaccaagcccaggctctcaacaaaacgttgtgcgaatgcaggccaattgatctccggatagctgatggtatgtgcgttgtaattgcccacagcaccgttgatctttccgctcagtgcaatcgtggcgatttgatggcgctggcgttccaaacgggctaccacattggcgatttccttgcccagcgtggtaggtgaggcggtttgcccgtgggtgcgtgagagcatcggttgtgcggcctgagtatgggccagggtgcgcagatgtgtagcgataccgtccagtgtcgggagcagtacgtcatttctggcttgttgcaacatcaagctataggacaggttgttgatgtcctcgctggtgcaggcgaaatggacaaactccagtccggggcgcagctctgtatcgtccttaagctgctctttgatgaaatattccactgcttttacgtcgtgattggtggtgtgctcaatctctttcacacgtgcggcgtgctcgatcgtcaaaccgtctgctaacgcacgcaggcgtgtttgcgcggcaacggagaacggtgccaactcgacaatgtttggttctgcggccaacgccagtaaccatgcaatctcgactttcacccgggctttgatcaagccgtattcggaaaaaattggccgcaatgtatcgactttagacagatagcgcccatccagtggcgacaaagcaagtaggggtaaatgtgacatggccgtaattgagggaagcgggagcaccgctattctacgctgcacctgtctgccctttctgggttggaatatggtccattcctgatcctgtgatcctgtgatcctgtgatcctgtgatcctgtgatcctgtgatcctgtgatcctgtgatcctgtgatcctgtgatcctgtgatcctgtgatcctgtgatcctgtgatcctgcttaggcacggctttggcagtggctgcaaaccatgccgatcaggttgttatgaaagtgcccaagcacgggattgatggaagttcacagcatggatgccccgcgcgatgcaaaaatccttgagtacaccagggcaggggagcaggtcgaacaggcgagcaagacagatgggacacagcctccaggacaacgtggcgcaaggtgcgatgttggctgctgttcgcggtttttccgatcgtgtttggtggggcgttgaaggacgtaaggatgcccggctggctatatatgggaggggagacgttgtctaactgtatgaagggagtatcttgcgggtgtgctgtcaattcatgagtgcagtttttgtcgctttcccgttccgtatcaggcggaacactgatccgtggagatgcagatgagcaacagtgatcgttacagaattgaacacgacagtatgggtgatctacgggtgccgatcgatgcgttgtggggtgcgcagacgcaacgtgctatcgagaactttccgatttccgggcggtcaatgcctcagggatttatccacgcattggggtttatcaaggcggctgcggcgaaggttaacgctgagctggggttgttaccaaagccaatggccaaggagattgaggccgctgcattggatgtcgctgcgggccgttatgatgcggattttccagtcgatatttaccagactggctcaggaacctcgtcgaatatgaacgctaatgaggtgattgcgacgctggccatgcgtgccaccaaggagcctatccaccccaacgaccatgtcaaccttggccaaagttctaatgatgtggttccaacagcgattcggatttccgcaacgttggcggttcagggacgattattaccggcgctcaagcatttacggaaaatgattaacaagcgtgcccgtggtttgggcagtgtggtgaagaccggccgtacccacctgatggatgcgatgccgctgacgttcgctcaagaattcggtgcctggtcggcacaaattgtctctgcggaggcgcgcttgaatgacaccctgaaacggttgcatcggctgccattgggagggacagcaattggtaccggtatcaatacggatccacatttcggccgcaatgcggtgaaggtactgtcagcattaacagggattcactttgagagtgcgaacaataagttcgagggattggcagcgcaagatgatttggttgagttatccggccagttcaatgcgttagcagtggcgttgatgaagattgctaatgatctacgctggatgaacgctggaccacttgctggcttgggagagattgagttgcccgcgttgcagccgggaagttcgatcatgccaggtaaggtaaatccggtgattccggaagctgtggtgatggtcgcctcgcaagtgattggccatcacactgcagtgaccgtggctgggcagagtggcaattttcagttgaatgtgacgttaccgctgattgcttacaacctattggagtctgcgacgttgcttggaaatgtggtgatgctgttggctgataaagtcatcgttggtctgaaggtgcgtcaggatcgagtgcaggaggtgctggagcggaatccgattttggtgacagcgttgaatccgatcattggctatgagaaagctgcggtgattgctaagcgtgcttataaggagcaccggccagtgcttgaggtcgcctgcgaggagagcaacctaaaccctgtggagttggcgcgcttactggatccgactgcgttgactgagggtgggatttatgtcgtcgggggaggtggtggataaggtatgttgctggaggctttgtgtcatcacattggcagatgcggatgttgcatcaataatcgacccaattaatgaatgcatgaatatctaatataatcaatgaattaaaaaatatgcccgctccgcaatattggaagcgctccgcaattcaccgcgtaggcgtgaccttcgcccctttgcgcttgcgtacatagtgctccgtcatcgtcaccgacgcatgccctaattgcgcttgggcttggcggatgtccctcgccaaatctgccttgtcggtcatcgcggaattggaatacctccttggcaatccctgcggcaacacgtgccttatcaaacctgtaacgcaatcctgtacgacttagctccaagcctttcgcatccacaatcaaacgtgtgctacgcagctttaacccccgcttgtgatcaaaaatacgctttattaaaactgctaactcacccgtaatcgcaatcgctaatttcactcccgttttagcttggcaaatctccaaagcgccattaacaatatggcgctcatccatagacaccacatcgctcacacgctgccccgtcaggtaggcgaggtccatcgcatccctgagcgtttgatccgctgcatggtaaacagcacgatacgtcgtatcgtctatatacacgtcgcgcccccgctccttattacgacggatgcccccgcaaggattgggaagatcagtcactcccttactccgcgcccaattccaaagatgcgaaaataatgctacttcacgattagcgcttaccttaaagggccgccaatctagatactggcggatattcaccggtttaatggactcaaacggcgcggggggatcgtcaaaaaactgcaacaggtagttcaaatatatgtggtgcatgcgttgggtgttgtgcgcctttgttgggatcacctcagcgcggtaacgctcggccacatggcggaacgtcaccgcaattgcaggagtgatctgcgcatgttctagctcagcccaccgcttgatggctcgcgtcctagtggtgtctctttgcgtggcttgccgccatgatcgtagtagtaatgcacgacgccggacttctgagggcgcacgcgaaacctcggaattgcgcctgttttggttggcttacattccatcaagcgaccttattagatttccacacaggcggaaccatcggagaaggcggcatcgcgtcaatcgcagcacgcagcacgaccggccaatcatgcgcatccagatagtgcctaatgccgttcttcctaagaaacgcagcttggcgagcgcgttgcggggtaccgcatagctcggcaacctcacttctggaaagacataaaccagcggctgggggcatgtctcgtagttgtcttgcttgcacattaaccattgtctgatccctgctcggctaaaacggtgggtcgtcatcgtggaagtcgtcgcctgcatacgcataggctttatcgttgttgcgtgcctttgccggtcgccgctgtggcgtgataccgctggatccttcatcacgaccgccgagcatttgcatttgatcagcaataatctcagtgacataacgctcctgcccatcattgccggtgaacttgtcgtaacggatggtgccctctatgtagccaggatcgcattgccgcactcctgttaatcggccaatacatttctacagtgcctggcgtgaaaccaggaattgctgccgccgcgaccttggcctgcatcaaaagcaatacgaatttaacgaccgaagagatacgccgtgcattgcctgcgttacaggaaccgctttgcctgctcaacgccacgcaactaggcaagcggctgcattgctcggccaaggcggtgaaccagttattagcctccagaggctttcagttccgtaatgaacgtgacgaatgggaattaaccgaagccggtcgcgtgtggggtgaagccattccgtactcgcgcaacgggcacagcagttatcaacttttgtggaatccagacgtcatcgcgtgtctgagggaggctgcatgaattattacgaacgccacattggcgattacgcccgtgacacggggtacctctcggtgctcgaacacggcatttactgcctgctgttagatcgctactacgccacagaacaaccgataccggctaacaaggcgcaccgcatcgcacgtgcctatagcaaaaaagagaagagcgcggttgatgtggtgcttgatgaattcttcttattgcaagacgacggctggcataacaagcgatgtgatgaggaaatcgctcgctttcatgcaaaggcagcagcacagcaggagaacggcaaaaaaggagggcgacctagaaattctgctcatcatgacagccagacacaaacccaacagaaacccgctgactttgatttagataacccaaatgaaacccaatcaaaagccaacacaaacccaaatgaaacccagatagaacccaatcaaaagcccaccagaccccagacaccagaccccattatctcttcctcactgcgttcggaagagagtttggtattcgccgaggacggcaacgccaccggctgcaccggaaaacccaagcgctcgcctcacggctcacgcctgcccgatgactgggcacccagtgagggtgatgtgttgtacgccacccagcagggtgtggatggacgctacgaagccgagaaattccgcgattactggcgcagcgtggccggagccaaggggcgcaaacaggattgggaggccacctggcgtaactggattcgccgcgctgccgaagacaaaaccagctccatgaagcacggatatcaacgccatgaatacaattcaaaacctatgcgactgtctcccgcagaacgatcccacgtcttccatagaccctttgatctgcgtgacggagtgctccagtaacaccgcctgccttgcgcaagccacggtgatcccgttcccctggctgcgccgcttgtgggaacgcatgattgccctgtatggcaatacctgggtgagcgctcatggggagtcggcacagagagaagatggcacgctgaccgtggacggtgaaacctggcagaaggtgctggttgggctggaggcgtctcagtttgcggacgggttggcggcgtgcattactgaaggcggcgagtttccgcccagtgcgccacggttccgtagcatgtgtttaggcgtgccatccctggcggcggtacggagtcacttcaccgcaggcagcacgcggggcaatacgccgtttgtagccaaatgctgggagttcatcgacccatggagctattgccagtccagccgtgctgaatcggatcggatgctccgtgaggcctacgagcaagcgcgagactttgtgatgcgtggcggcgtcctgccagcggtgcccgtcgccctgattgaggcgcaacagcccgcagcgtcccaaccggcctcccctgaggtggctcaagcagcgctggaggaaattagcagcatgtttcatcaccctgagctggccgcccgtgaggagaagctcatggctgagttccacctcagccggaatcaggcgcatgagctgattgaatcgggggtgctatgagcaaggcgatgcctattgctgcctgcggcatggcagcagtgaagcagatgcaatctttaacattgccgtggccctccaaggacctgtcaccgaacgcacgggtgcattggacacggcgcagcaaagccgtaaaacaggccagaggctacgccgagatcatggcacgacgtgccggatggggtggcctgtcactccctgttgaggggcgcctggatctatggattagcttctatccgcccacacgctgtctgcctgacgatgacaacatgctggcgcggtttaagccttaccgggatggcattgccgatgccctgggcattgatgaccggcgttttgtatcgcatccgttggttgaggatgacaggcgcacgggtggagaagtggtggtcaggatcaccggcattgaatgaacatgacaggagattggccatgatgaatccgcgtcgtttactggctcgtctgaacccgagcacgatccgctacgacacgctgcctggtggagtgcctgagttgacagcgcaagacattgcccatgccttggggctggtgcctgcgggcttggggcgtgaggtactggaagcgtgctggtggccggatggcgcagcgttgcgccgtagccccttgcgcgatgcggcggtggccttggtggtgccggagattcgacggcagcagcagcgcttgctggaagcgcgtacggatgtgggcattgtcaaagcgtgcatggggtggacccgagcgacgacaagcgcacagcaggctgcgctgaagcgtgcggaggaacggctggacaaggtgaaagcccacctgtggccgcaggccacgttggagatgttaccggcactggttgcggcggttgtggatgagctgtccaagccgcagttatgcccctgctgtcatggccggggggaacggcgtgtaggggcgttggtgaaggtgtgcacggcgtgcggggggagtggtgcggttcccgccagtgattgcaagcgcgccgctgcgattggccgggatgaatccacctaccgcagagcatggtgcggcgtgtatgagtggctgttggagcggatgggtgttgcggaacgacaggcggcgacgcagttgcaagaggcgttgcacagaaatgtggcgtgatggctaacggtgtacttaccctcactttccatcctggcatttgtatgatgttgcaaaggcaaccattgaacgtatgagtcaggggctttcccgagatgagttgttaggtgcagcgttagttaaattaacttaactgtttatataaaaagcttggtaacgtcgatttattatttatacaataatttaaatgaactacgaatttgattctgctaaaagcgaaagcaatcttgacaagcatggattgtcgctcgctgatgccgatggttttgagtgggaaaccgccgtggttcgtgaagacacacgtaaacagtatgcagaaccccgttttgaagcaaaggggtatatcggcaaccgtctgcatgtgatggtgttttgccttcgtggtgatgctgtacgggtcatcagtctgcgtaaggccaactcaagagaggtgaaaagctatgccgacacttaaacaggggacgatgatccccactcacgacgaaacagaggtaattaatgcgggcatcgccgctgatgtagatgcgcgtgaactcgatagccaatggcataagggggccaagcttgcctgtgaagcattctcccctgagatatacactgccttggtcgccatgaagcgcccccgaggtcgcccgaaggcagaccaaaccaaggtgttcactgccattcgcctggatgctgatctgctggaagccttcaaggccacaggcaagggttggcaaactcgtgtgaatgcggccttgcgtcagttcatcgccgagcatccactcaaccaataagtatctgtagcgatgcaactcccctgagtcgtcgcgtagtgttgcattgatactgcaacactttttcccctactgtacgcgcctgagtggtgcgatgccctcatcgaatgatttactcgcgccctgcccacctcagcagggcttttttttattcaaaaccagcgaccgccttcgggcggttttttgcgttctggagtccccccatgcagaccattggtgaagaaggcattgcactgatcaaattttttgagggttgcaagttgaacccgtacacctgtcctggtggagtgttgacgattggctacggcgagacgggcaagcacgttgtgcctgatatgtgtcttgccaatgagcaggaagccgatgcgatgttacgtgcacgcttagccaaagagtttgaaccggcggtgcggcgttatgtgcgtgtgccactgaagcaacagcagtttgatgcgttggtgtcgttgagcttcaacattggtacgggggcgtttcatcgctcgaccttgctaaagcggctcaatgccggtgatgtggctggtgcggcggagcagtttggggcgtggaagttttcaagcggtcgtgtgcttcccggcttagttcggcgtcgaaaagccgaacgttggttatttgaaggtcaagattggcaggccgcattagcagccgaacatgcggcggtgaagaaggcatcacgtgattgatattgcggcgcttcctgcctggtggaaggaggcgttttatgtgggcctggcgatggccacggggacgctgagttacgtcatgcgtgcactggacgctaagcagaggctggcggtgtcccgcgtgttgattgaggcggggattgcggggtttgtcggcttattcgtgatgtgtgtgtgtgaatggttggagatgagccaagcgttcacggtggcggcggtgattgcctccggtttaattgatacaccgcagacgttagagctgattcagaacgtgattgtgcccaagctcggcacggggagaaggaatacagatgatcgttaatacactgcgtcgtgtggggcgacgtttgcccagtgtgcggctgttggttgagtacatgatgattggtgcgttggtggcgctggtggcacatgcggtgctggcctggtccgagcgcagtcaattagcgcagcgggcggcgcagctggaaggccagttagcggcggtggaaagcacgttggatgcgcaagttgcgatgaatcgcgatcaagatgcggcgattgcgcggctacgtgcgttacgtgagatcgacaggcaggcgattgcggggctgcatacggatttaaatcggatcacggtgcgcgaccgtgtgttgcggcagcgcatcacgcatctggagcactttcatgatgaggcgaaagcttttttggatagggatgtgcctgacgtgcttgggtgcttgctcgacagggacggctgtcaagccggtcacggtgaggcagacccgcgttgaggtgatcctcccgccgcagggggtgttgcagccgtgtgaggccccggaattagggcgtgtggacacggtgcgtgacttactgaatcagacgttgggatggcgttttgcctatgagcagtgtgcggcgcaagtgcgctgtgttgcggcatgggcacaggcggccagcgtcgggcagccgtggtccgcagatggctgtggtgaagaggccgaatgaggcgggtgtttcctcaatttttttcgccccctatatatagagaaacgaaaaaaattcaccggatattttgttttccagggaggccgtgcgatggctgagagaggacgtaaagcgcatctaccgacagatgaaaatcgcgtgatggtagaaaagctggcgtcgtttggcacgcctcatgatcacattgccttgttgatgcagatcagtgcgccgacgttgcgcaagcactatcgtcgcgagctggacattggtggtattcaagccaatgccaaggtggccgaaagtctgttcaatatggcgacccacccgacgaggccgaacgcgcatgcggcccttggctggatgaatgcgcgggctggctggaaagacacgcaacgcgttgaggtgtccggtcgcgatggggaggcgattgaacaaaaggttggattggcgttagtcgatgaaaagcaaatcgccgccatcgtgcagcgccttgaatcggagtactgagcaggcgcaagaacaggcggtgatcaaggcccggtgcgaagcagatcatttatttttcacacggtattttttcaaacagcgtcagcaactgcggtttagggtgaattggcaccatcatgtgattgctggggtggtggacgatgtgattgcagggcggcggaaggatgtggtgattaacgtgcctcctgggtcgtcgaaaacggagcttgtggcgattaatgtgatggcgcgagggttggcgctgaatccgtatgcgcggtttttgcatattagttattcggatgatttggcgctgctgaattcggagacggcgcgggagattgtgcagtccgatgaatatcgtgcgttgtggccgttggagattgctgacgatgccaagtcaaagaagcgttggaatgtggtggtggatggcaagaaagccggtggggtgtacgcggtgagtctgggcggacaggtgacggggtttcgggccggacacatggccccgggatggcagggggcgatcattattgatgacccgctgaaggtagaagatgcctacagcaagaccggacgcagtaaggccaaccgtaagctggtgtccacggtgaagagtcgtaaagccagtccggacacacccatcattgtgatcatgcaacggttggcgcaggacgatccgacggggttcatccagtctgggggatttccgggcgcgtgggagtgtattgagattcctgcattgattgatgatgcctacgtgtcccgtttgccggagcacgtgcaagggcaggtggtgcgtgatgcacaggaccaggatggacgctacagctactggccgtacaaagaaccgttagccgagttgctggcgttggaagccacggatcgttatgtgttcagcggtcaatatcagcagcggcccagtccgctgggcggtgggatcatcaagggtgattaatttgggcgctatacggtgctgccgcgccttctttcgcgcacggtgtatggcgatacggcgcagaagacggctgagcgcaatgattacagcgtgttccagttgtggggcttgggagaggacaagcgtatttatttgttggacatgattcgcggcaagtgggaagcgccggaactcaagcggcgggcgattgatttttggaatgcgcatcgcgcctacgaccataaggtttcagcgccgattcggcagatgaagattgaggacaaatctagcggcacgggcttaattcaggacattgccagaggtggctccggtcaggggcggattccggtgactgggattgcacgggtgaccgacaagctcacgcgggtgatggatgtggtgtcttacattgaggcggggtgggtggtgattccagcgcaggcggggtgggtgaaagattttgtggctgagtgtgaagcgttcaccgccgatggcacgcatgcgcacgatgatcagattgatccgatggtggatgcaatcaatgatttgctggccaatccgtccagtgattggagtcgctgggtgtgagtggccgcaatcgcaacacgcgtgccacgcgctccagaccgggggcggcacctcagcatgtcgtggacaccttgcagaacctggtggccggactgggcgatcagcgcgacaagatgagctatgggcggtacctgctgccccgggtgattgatcgtgtggaactggaggcgatgtaccggaccaattggctggcgcgcaaggtggtagatattccagcgaccgacatgacgcgggaatgggtcacgttgcagacttgcatgcaggccgatgcgctggagccgatgtatcgattggaacaggcattgaacgtgcgcgccaaggtacgcgatgccttggcctgggcacggttgtacgggggggcggtgctgtttatcaatgtgcatggacaagacccgtctttgccgtttgatccggcctcggtcatgccggggagcaggctatcgctgacggtgttggatcgctggcgggtggcgctgggcagtggtcagatggaccaggaccccttgagtgagacctacgggcaaccgcgctgttatcagattgccggatcggtggagcgggtggatcgttcccgaatgattgccttctctggcgcggaactgccctgggaggcattcagaggcaacggctactggcatgactcggtattgcaggccatgtacaacgcgctcagccgctatgacaccgcgacccagggcacggcgtcgatgttttttgaggcggtggtggatgtgttgcggatctctggactcagcgacactctctcctccgaccaagggacgcaagaggtacataagcgttttcagttagcggccatgatgaaatcgttcaatcggatgctgctgctggatgctaaggatgaatacactcagaaaaccaatcacttttcgggcgtcaaagaggtgattgagcaattcatgatggatatttccggggcggcggatattccggcgacgcggttattcggtcagtcccccaaaggcatgaacgccaccggtgatagtgatattcgcaattattacgaccgcatcaaggcgcagcaggaggacgagctacggcctgtgctgagggtgttgtacgccgtgctgtttcgggcctctgtgggggagtgtccgcaggatttagagattcagttcaattcgctatggcagatgagcgagacagaacgggcgagcattgagaagctgcgtgccgagcgtgatcagatttacctggcgcatggtgtgatcggtccagacgtgccctgtgcggagctgctggaacaaaagacgtactcaaatctcaccgaacgcgatgtgaggctggcggcggaactgtctcaggcgatggagcctccagatgtgttgccagtggtggaaacgacggcacccgcttccaatacataggctgcgattggaatcatgcagtggtcagataaaaaaccggcgaagcactcacgccgctttcagcacgcgcatttccacatgcatgccagccgccgcagccatgttgaccagtgcatccaagccgaacaggttgattttgccgcgcattaaatctgacacgcgaggctgcgtgacaccgaacagcgtagcggcttgagactgactcagcgcagccgtttcgatgtgttgtttcagggccatcatgagtgcggaacgtaacttcatgttttcggcggcttcgggagtgtcctcaatggcatcccacacacttgtgaatcgctcgttgctcattgtcctacctcattaaacagatcacggtagcgtttagccgctacatcaagatcgcctttggtggttttctcagttttcttttggaagcaatgcaacacatagacagcctcggacaacttggcaacgtagataacgcggaaagcgccgtctgcgtcacggatacgaatctcgcggactccacgccctaccgtgggcatgggcttccagtcgtcagggtcgcgtccgttttgcacttggtgaagctggtacccggcctcacgtcttacgctcactgggaaagcgcgtaagtcgtcaagagcgctgcctctgaattcaatcggtttgggtcctaccatgcgccatcatacaaaactttgtatgagcgcaaggacatctttgtcggcccgcggaatttaggttcactgaggatgttgacattaccggacctactgcgcttgcagggacgccggatcaagcagcggcagttacgcccgccgcgccccagccgccacgctgaggctacgtacaggaatgaactgctggccttggtgcgggtgctgcaccaggcggtgcgggaggaggtgctgccggtgctccacgcatcgccgccccacataacacgtgatgcgcctgacggcagcgccccacagggctatctggcctcccagttcatgcaggccatggaagcggccttgcggcgggcggcgttgcgctgtggtggcttgcctcaatgggccgagcggatggccgcccagcaggtgcaacgtgtggatcgtcaggtggtacagacgattgggagtacggtgcggtgcgccttcgggatcgacatcacgtcattgatgctggcccaggaggtgcgcacgcagatacacgcggcccgtgctgtcaatgtccagttgatcacctccattcagcgacagtatttcgacaagatcggtaccgctgtgttgcaaggcgtcatgcagggcacacgcgccagcgcactggccaaggagatggaacagatcaccgatgccacggcatcacgggcgaagtttattgcacgggatcagacatcaaaaatgaatgcggcgttgaatgaaatccggcaagtggggttgggcattacgacctacacctggcagaccagcggggatgaacgggtccgtgaggatcatgccgcccatgatgggaacgtgttccgctggagcgatccccccgcgacggggcatccgggacaggactacaactgccgctgtgtggcgattccgaatgtgacgctggaaggcccttgatgatcaccctagatgtccaactgacccagcgtcgcaagacgccggaagggtatctgatcgtgcctgcccgatttgcgcgcatcggcatccagcactatgccgcccacgaattagggttgagcgatgcggatccccagcgggtgattcgcgtgtaccgcccccctgaagaagtgtttgctgccgaggccatcgccagctttgatggtcgcccgattaccgatgagcatccggatgaggaggtgaccgccgagaactggcgcgcccatgcggtgggctttgcccgcaatccacggcgcgaaggggagtatctggtggccgatctcaccattaccgatggggcgacgatcgaaaagattgaggctggacaacaagaactctccggcggctacagcgccgagtacgactggaccccgggctggaccccggagggcgaagcgtatgaggtgaaacagattcggattcgtggcaaccacattgccaccgttgccgcaggccgtgctggaccccagtgccgcgtggccgatggcgacatggccttacccccaccctttggagaacaccccatgaccaaacgccgcatcagtgtcgacggtatcagcctggagcttgaagagacggaggccagcgccgtcgaacacctggcggccaagctcaagacggccaccgagaaagtggatgccctggaagaggatctgcacgccgcccaggcccccatcaaactggacagcggccaagcgctgaccaaggaacagctggtggccaagattgcggagctgtccaagcaattggcggcgctggaagcggcccgcgctgcggacgaagacccgcaacagcgggatcaagcgattgaagccatgtcacggcagatgggcgatgcgcggcggctggtgccgggcctgatcaccgatggcaagccgtgcagcgcgatccgccgtgacgtggtgagccgtctataccccacgcatacggccatgattgacaccttactgcacggggtccgggtggccgatgccgcccagacggcggtggacctggcgtttcacgttctggcgtctgcgccggtgacggcctcggcagggctggctgctgaggcggtgaatgacgcgttacggcgtcaggtcgtcaagacatcggatgccgacttggacccgcgagcggcgtatatccaacagctcacccataccacctagagcacttcagcacccgaaggaacacgtatgtccggaattgatttatccacctatggtgggcgcttacttgatcttggcgttgcggggcaagtcatcgacttgaacaccagcggcctttacaactacaaaaacgccggagaaaccccgattgattttgggttatttgtggcacgcggccccaaagacaacacctgctgccttccaggcagcgatgccatcagcatcctgggcgtgagtgtccgccacgtcacgatggtcgccgatgaggccggacaggtccgctatgccccccatgcgatggtgccggtgttggagatcggtcgcatctgggtgatctgcgaggatggctgccgcccggatgatccggtgttgatccgcattgcaggaacgggggccttgggcgcggcccgatccgccgccatcgcttcagaaaccattccttacccacaggcgcgctgggacagcaccaccgcccccggagcgctgggcgtgatccgcattcttaactaagggacctgcatgaacatgattgacatacgccgccgtcagatggccgatgcgttgaccccgatgttgctgaccgatgcgcggtatcagacctctgatgccacccaagcgctggcgtttttggtgtcgcaactgacccatgttgaatcgacgatctacgcccgccagcgccaaggcatccagtaccgggatttggtgcccatcagcaccgaagcgggcgagtacgccacctcggtgacctatcagatgtacgactattccggacgcggcaagcggcattctggacggggcgaagatattccgacggtcgatgtggcctacgcacaaaagagcgtgcctgtcgtgctgggcaccattggctacgattacaccaccgaggaactgcgccaatcggcctttctgcgtaaacccctgaataccgcgcgggccgatgcggcgatggatgcctatgagcgccatatcaacgatgtggcgttgtttggtgaggacgaactcaccggcctgtatacccatcctggcgtgccggtcctgttgaacacggcggggccttggatcggtcagtcgcccgcccaggtgctggccttgttcaatcagctgatctccagcgcttggatgaacacccactacgtggagatgattgataccgtgctgttgcctggtcgcgtcatgaactatcttgtctccaccccgcgcagtgacaacagcgataaaaccattctgcattacgtgttggaaaacaacattgctaaagccgagcgtggccttgatctgaccgtccgcaccggctacggcttagagacggcaggggaaggcggcacgacccgcgccatggtgtatacgaagaaccccaccaagctggtgctgcatctgccgatgccgatccggtttttgcccccgcaacccaagggcctgaggtttgatattccaggggaatacaaatacagcggtgtggagtttcgttatccaaaatcagccctgtatgccgatggcatttgagcctgaggccacacgcacgacactagcgccctccggcgctttttttttggagaacgcagcaccatgaccacgatcatgctcaaaaacacccgcagctgtgatgtcaccctggatggcgtgacgatccaggccggacgcacccaggccctggaggccgcacacgtggagcagctgcggcagcaccctggcattggcctgtggtttgacaatggctatctagtggagcaggaggtggaaccgtcacacgccccagtggggggtggtgaaggggagaaggaccctgcgacagaaacggggcctgccacagaagaggccccgcatgacgctgcaccgggtaaaccaggcaaatccagaaggacctgatcatggccgagtcactgacgattcacacgttcctggcgcgttaccctgagtttgaaccgttgccacaagaccgggtggaacaggtcattgacgatgcacgcctctggctggatgcctcccgatgggggcatttttatccgcaaggcttagccagtctggcagcgcattttctgtggtcgtctcctagtctgggtgccgaccacagcgccggagccagaggcgcggtggtgtccgagcgggccggtgatctacagatcagctacgcagcgctgtcctctggcactcccagtgacgcctggctagccacctcggtgtatggacaacgttacctggcgctgcgtcggatggtcggcctgggggccttggtcgccccatgagtgccgtcacgatccttcggcccgtcgatcccaaaaagtggaaggccctggcgcagcggcttcagacgctgggggagcgcgctgtggtggtgggcattgctgccgcgcagaacgcccggacggaagacgggatcggctcggctggactgttggcggtgcatgaattgggtgcgccagagcggggcattccggagcgctcggtggtgcggcgttccatcagcgcgcatcaagaaaaatatgtggctttgcacacgcaccacgtgcgcgcggtgctgcgtgatgcgatgaccgtagagaccgccctgaacctgctagggacggtggccgccggtgatgtcaaggcgacgattcgccacgcggatcttgccccgctgacgccccaaacgatccagcgcaaagggtccagcgccccgctgatcgataccggccagatgatccaatccattacccatgaggttagggatgcttgatctgcgccctattttccgcaattcaaaattggcccagcgtgtccaggtgctgcgccgtcagggccagtacctgcccgatggcacctggcaacaggagtctgtgttggacacggtgctggcgatcatccatcccaccacccccgatgatctgcaactgcttccggaaggagaacgccaccacccatcgaaaaagatcatgagtcaagatcagatcgatgtgggtgatgtgctgttgtaccaagacacccgctggcgtatcacccagctttccaactggtccgagtatgggtactaccgaggcatcgccgttggacatgacgggactgcgcaacctgctgcggcggcttttgtcactacctgaaggtgctgtccgtccggcggatcagcccgcgcccactggatcggccccttttgtgacggtgaagcgcctgcgttctacccccttgggagccgaatgctgcgcctttgatggccgccagcagagcatcacctgcgcctatctgcaccacatcagtgtgaatgcctacggcacgggcgcttatgaactgctgttgcaggcacaggccttactgagctgcgaggcgggcacggcagggctgcgcgccttacgtgcgggcctggtgtccgtcacggctgtccaagacctctcggccattgtcggcgctggctatgaagcccgcgcccggatcgaattacagatcacccaccaccaccgtgtggtgaccacgctggcggctgtggacagcgcagacatccatattcacacccgcaccggtcacatcgccagcgtgaccatgacggcaccggagacccagtaaatggcgctacctctttcaaacattgtcactgtgcaactcaatgcacagcccctgttggcctcccggcgtgactttgggaggctggccttgttcactcccgaagccggcagcgtgtttgtcgataccaaaacacggttcatggatgccagcacgcagcagcaggtggaacaggcctttggcagttactccaaaaccgcagccgccaccggccgcttctttgcacaaagcccccgccccaaacagctcatggtggcgcgctggaatcgctttaaacaacacattgccgcctccccaacgacactcacctccggaacgattgctcaggcgcagacgtggtacaagggcgtggatgacggctgtttttccatccgcatctatggtgtggatgtcaccttatccaaactgaatttcaccacggccacctccttctcccaggtggcaggtgtgttgaataacgcactggatgagtttggagtgaattgccgatttttaaatggctgctttgaactctatgcggccgtggccggaggaaatcacgccattggctatgcacagcagcgcagtccctctggcacctatgtcgggcactggctgaagcttgaagccgatcaggcccgcctgaccatcggcaacaacgctgacaccatggaggccgagacactgccggaggcctttgcggccttgcaggcactcaccccaggctggtatgccgctgcggtggccgatgagacattgacagacacgcagatccgatccgcctccgcctggatccaggcggcagacaaaaaaatcatgggatggacgacccgcgaggcggcgcatttggactttaaaaaaaccaatgtgttcagacaactcaatgcatcggggcatgaccgtaccgtggtgctgtacgacaccacagacccctacgcggtggtgtcctggctggcgcgtgcgttatcggtgaacttcagcgccaacaacgccgccctgactatgaaatttaaacaacttcccggcgttgcggcagatcaattgacacagacccaggtggcccaatgcgtgcgtttaggcatcaactattacgcctacgttgatgatgtggcgatggtggccgaaggcacctgtcttggcgggcgcttctttgatgaagtccatctgctggattggctggtggatgcggtgcaaaaggaggtgtttgccgtcctgcatcgcagcccgacgaaggtgccactgacggatgcaggcacccacctgctgatcgcggcctgcaaaaaagtctgccaagaaggggtccgtaacggtgccttggcccctggcctctggaacggggaggccttcggtgcgctggccacgggcgattacctggaggctggtttttatgtctgggctgattcagtggacaccttatcgacctccgatcgccaagcgcgccgggcaccgccacttcagatcgccgtgaagctggccggggccatccatgcggtggacgtcctcatcaattttgaccgataaaggaatcccatgtccgtcttcgaccccaaacaagtgtcggtgctgctcaatggaacccagatcaaagactgggccgatggcacggacgtcatcgacgccaaacacaatgctgatgccggtgcctacaccatcggggccagcggcacgggcgtgtttgtcgccaacgccgatcgttccggcaccttaacgttaaaaatcaaacagcacagcgctgacaacacctttctgagcaggcgactggcgcagcaacgcggcgcgatccagtccttcacccccttcaccctggatatccgtgacctgttgaatcaggacgtggtgacagccaccaacgggtatttcacgacgccccccggatttacccggggcgccggacacaatccggaaacctggacactggtgtttgaggtcatggagatcaccctagaaaaaggctttggcaacacatgaacaatgaacatcgttttgaaatagagggcctcacctatgtcatgaccccggccaatgcgatggcggcgtggcaatcgctcaaacgcgccggggtgctgctgcgggggatggatgcggacgccctggctaacgcgcaaggcgccgcctccgtggccctagggacgcttctaagccacctgggcgaccctgcggtcactgagatagaagccctggtgtttgaacagactgcgatcaagacccccgagggcaccacctaccggctcagcccagatcggctcaatgagcacttcaacacccgccgcacccatctgctgcgcgtcttgatggaaggagtcaagtatcaatacagcgattttttcgttggcggcatggcagccttccaggacctgattcccatgccgagcgccgagcaggagtaaccgactggtttgtctgggcaccgatcatgcgcggctattgcgatcttgagcaactgcgcaccgtgtactccctcagtgacctctgtgccttccataccgcgatggtggaatgggatgccctccagcatgacgcgctaaccccctgcgatgattctcgacgaattcctgatccgccttggcgcggtcgctgacacctcagacttcaacaccttcagcacctgcctgacccgcgtcacaggcctcgtgacggtggccgccgccgccatgggcggggcgctggcgggaatgaatcgctttgtcggcagcgccttaagcgaactcaatgccctcaatagcgccagccagcgcaccggagccagcctgtccttcctccaggagctgggctatgcggcgcgtttgaatggctcctctgtggaggcctcgacccgttctattgaatccttgtcccaaaaaataggcgaagccgccaatggggtagggcgcggggcgatggtgttccagaagctgggcttgcaggcccgacaggccaatggctccgtgaaatctgtcggcgacatgctggggcaggtgcaagaaaaaatccgtggcttatccgcaccacaacagcagtccatcctggccaacctgggcatggatgccacgatgttgcaaaccctgcgcctaagtcgtgaggcgttaaacggcgtcttccaagaggcacaggatctaggcgtcatcaccgctgatggcgccgataccgcgctggagtatggcgatgcaatggaacgcctgcgcgtggtgctgggcgcgttacggaccaacatcgcgattggggtggcaccggccttcacccgcctgattgagcactccaaacactggttgattgccaataaagcgcaactgcgtgatggcatcggcaaagtagtccacatcctcattgcagcgggcactgccgtatggaacttcatccgtgcggtgaacagcgcggtgaatcagaccattggttggaaagcggcgctgctggccgtgggcgcggtgctggcccgggcctttgcactgaacccgctcacctggctcatcgccgggatcgtggccctggtggcgttggtcgatgacttcatgacctacctggacggcggagagtccttgctcggtgccttctggggtccgctgatcatctacgccaagcgtgccaaggcggtgatggcagacctcacgcccgcactcaaagccgttggcgtcctcttggcgggactgggcatcggtcacgtggtgagcaacatcggccgcctcgtgggtgcaggccgcactctggcgctgtggctggcggggccgttggtgaaagcaatccaggttgccgcgctggcgttgcgtaccgccttcctctccaaccccattgggctgctgattggaagcgtggccttgctggcgtatgcgatctatacgcattttgacaagatcaagcaggcagtggggacggcctgggactggtgcacccgcaccgccaatgccgcgtttgggtccatccaacacacgctgcaagaggttgccgccgccgccaagaccacctgggccagcgtcaaggacgcctgtgcgctggcctttagccacagcatcgccgccgccgatcacgccgtaaaccgcgtgcaggccgtgttcagcgccatgggcacccgtatcagcgccgccctgagcagcgctttcaacaccctcatgaggctatgggatcgcaccgtcgggcgtatcgcccagggggccgagcggatcaaaggcttgttccgagcgattgctccaacactgaagcaggccggtcgtgacacccaagacgtggcgcagcgcgtcaatgcacaggtgcaggccgcccagacgacaggccgccacgccgctgctcaggccgccacgcccgcccgttcccaggccaacgtccattcccaacaggatgtcaagatcgatatccacaccgccgacccgatcctggccggtcgccaagccgccgccgacatcaacagacaccaccagatggcactgcgcaataccggcagtgctgtggcgttttgaggggattgtttaagaaaacagactaaatagtctgccaaaccagagtgcaacagtcggtacgtggggtagccaacctatccctatagataatggcaagcaggcagatgatctccgaagaggaaagtggttataactattttgatatatgaatataatgttaattaatgcgactataatcacaaatatgtgatatcaataaatctcctctatttaaaaaatgcgtttagttaatgactgtagcattggaggaaacatgaatcgtgtgattggatatcgcaatcctcgtatacagggatgtttatctaaacagtttaaggagtaaaaagatgagagagttgacctttgaagaagctgtaaaagtgggtggtcaaagttggttcggggatcttgttcataccgtcgttgagtatgctggacttggggcgggtgttggtgccgtatttggcccggagggtacagctataggtgcggcttttggtggtttaattggagcctggaattatggagactcccatccgacaccaacccacccttactacccaacaattcataatatagccatgcatgggtcgtgaatatggaatggaattgatcatctgggccgagtggtgcttcttagccactggttcagtaacttgacaatagttggttggccgggtgatcggctcaataatgagtttgctcccctcacggtggatcagaacacgatcgcccggcaactcgaattcaacgggaattcgtaccgcctggctacgattatttcggaatagcttcgcttccttggtacgtgatgacggagatgaaattggcattggcacggtacccattgcatatacatatttgtatatgcatggatctgcatgcctagcattctcgtcggcaaatctcaccccggtgaccaacacgcactacaaggacgcgcaaaacgctatcttgaatgtcagccctctctatgtttgtttgctgtattgccacggattgatgacttgcacaccacttgactcataggctgaggtgtcgcgggaagccactatgtaacctcgtgatgcagcaattgccgcgatatagccatccggtgtggggaagccgcgcccgctgtttctcgctttcactgccagttcggcatagtggcgtgccgcgtccgtattgaacggcaacacccgttcattgaacagatcaagcaagccatcaagggttcgagccaacatgtccttgcgtttacttgtgggcaacactgcgattccaaacaacagttcagataacgtcacactggataggtacaacgtgacgctcatctgctcgttgagccaggttcggactgctgcatccggttcgggtttcattgcttcggaaacaacattggtatccaagacaatcattcattcaaatctcattggctcggcctgcgtcttatctcgcaccttatcaaaggtcgtgaaatcctcgttatttagtccgatctcgcgtcccagggtagccaaggcatcgccaatgcgaacacgctcatctggcttgaccatgttcgttaaaatctcacgtacttctgcttctgtactgcggccgtgtgtggcggctcgaacccgcaaggctcgatggacttcatcaggcaaattacgcactgtcaacatggccatattcaatctctaaagatgtattcaatgaaatcattttatattaattgaatgcattctgccatcttctaggctcaatcccattatgttgccgccttcgctttccaccccctcatgatcaccctgacccaccgccacattggcaccgtcaccctggatgcggtgatggaagaaacgcaccaagccgagctgcgcatcactgaaaaccccgtagagtctggcgcgatgattggtgatcacgccgtcctgatgccgcaaaccgtcaccattgctggcattgtggtggactaccaacctcagcgcagcccagcccctgccgcagaggagcacggggccgagccattgcgtgtcctgacagatcgcgtgcctttccccacggacctgctgcccttcaccgctcaggcgctgcgtgtggcccaacgtgaactgtcctcggtgatccgccacgccactgcaccgcagagcgacggccagcccgccgtgcgccctctggccgattggctgccggattttcagccggtccccccccgtgatgacgctgccaccacaggacgcattgcccaggtgtacaccgccctacggaatctacaacgcagcggccagaccctggaggtacacaccggcgtccagacgtatcaagacatgttgattctttccattgcggccagacaaacccaggatggttccattgaattggtgctgaccgtgcgagaactgttcatcgtcaagacaacatccatttctggtgtctcattgcccgcccccaaacgcggtagagcttccgcccaaggcgcggcgcaacgccacagcggccagacccaccctaagcaggccgacaccgagaaaaatcgctccctgctacgtcagatgtctggactgttctgatgcgacagattcccgtggatagcagcccctaccaaacccaatcctttcagatggccggggacgccttacgcttgattctgcgctggaatccggtgccctgctgctggtcgatggacctgtacaccgcgaccctagatcagcccgtggcgcaaggcgtccccttggtggtgggcgtccccctgctgtggcggcgtcctgtggattacttcttttggctgacagatgaaagtggtttggagatggacccgatgcgccaacaggacctaggtgaacgctgcttgctgtttgtcggattgaaacgcgacgttcgcccatgaaacagtttggccgccagtatcgcctggagattggctcggcccaggagggcatcgccattgatacattgcgcatcgcctttgacatccgcaaaaccagcgactccacccccaaccccgccaagatcaccgtatggaacctcaaccgcgatcacctgagcttgctcaccagccgacagtacaacagggtccggctgctggccggttacgcagagctgcgcctgttatttgtcggtgacattatcaagcctgctgtgcggcgtgatgggacggattacgtcatcgaactggaatgcggcgatggcgatcacgactaccgcaatgcccacgtttccttctcgttggccgcaggggcgaccgatgcccaggtgctgagtgcactgagtacctccatgccgtctacccggctgggacctatccagatgcagggacagcgtggcctttccagaggcaaagtcctttcgggcaatacccgcgatctgctggatgcactggccaaaaatcatggcgcggactggtccattcaggatggcgcactgatgttactgcctgccgataccgtcctggccggtgacgccgtgctgctgtcccaaagcagcggcatgatgggctcccccgaagtgaccgatgatggattaaaaatcaccaccttgctcaatccggccttgcgcatcggcggcctggtgcgcgtggactcgatcatccccatctacaacggcgactacaaaatcacctcactgcatgacatgggcgatgtgatggccgaagcctggttcagtacggtgacctgtgtcggcggtgattttcagaacgtgaggccgtctgtatgagtctggatgactggaataacgcctccctcagtgccgtactgcaacgcagtaccgaagcgctggcccagcgcctgcgtgtggccttgcctgggcagatcgtccgctttaacccagtcacccaaacggcgaccgtacagccgttgatccagcagaagaggaacgatggctcccttcagcccttaccggtgctccaggatgtgccggtgtccttcccgcgtggcggtggctttgtgatgacctttcccgtggctgctggggatgaatgtgaactcatcttccaagatcgctgcattgatgcctggttccagtcaggccgtgcgtccgagcctgtggactatcgcctgcatgacctgtcggatgccgttgcctgcgtgggaattgcttccttacccaatgtcattccaacgtttgaaatggacggcgtggtattgcgtaccctggatggccgcgcctcattcaaactggatacccaaggcgtgatcacgctgcgtggcagcaaactggttcttgatcttcccgtggaattcacccagggaatccgtggtcatggcgacgtcgtatcaaacggtatcggcctggagacacacacccacggcaatgtggagaacggcccaggacagacaggccctgcccaatgagagtgcgccgcgtggacagccaaggggattggaccttcggcaacgggcgcggtaactatgccgctgccagcgattccgtggcacagcgggtgaagacacggctgcgctccttccgtggcaactggttcctggatctggaccacggcctgccgtggctggacctgatggagcggcctgctgacctggtacacctggagcgcgaggtcaagcgcaccatcctcaccaccgaaggcgtgcgccgcctcaccgccttctcaatggccttggacgcggatacccgcaccttcaccatccacgtcaccttgctggatgtggagcagcaggcgatgaccgttagcaccacgctgtgaggggatgctgatgacaaacagataggatttctttaaaggcttgtcgcgcatccggtcagtgaacaccagacggtttcgcagagagctcgatccctagcgccttcatcacggctaatgtcgtgcgcagcgtcgggttgccctcggcactgaacgagcggtagagctgttcgcgcgatagccctgtctggctggcgatctgcgtcatgcccttggcgcgggcaacgacgcctagcgcgtgggcaacgtaggcaggatcgttcgtcccgaacgcggctgccatgaaatcggcgatggcctggtcagtggtcaagtcctcggccggatcgtagctcgtcagtttctcggtcatggtcattcgctccattgttcagagaggtgcagcgcagtcttgatgtcacgcgcttgtaatcctttgtcaccgccgcaaagtagcaagtagatcgtgtcgccacgctgctggaaatacacccggtaaccggggccgtagttgatgcgaagctcgctgacacctttccctactggctcggcgtcgccgacatggccgaacgccaagcggtcgaggcgtgaggcgatggccgagcgggcgcgcgcatccttgagtttctcccgccacttgcggaaggtgtcagtctgcttcaattcaatcatgccatgattgtagtctaaaaaatactacgatgggaaacgtctgaattgcctgttgatttaaggatgacgttgtttatttctaatttattaagtgtttaaacaatgggaaaagtcaccaccaccggatacgaagcggaacggctggacacgatcattgcccgcttgcaagaaggctttcgctccatttacggcatctacacagattcaccaccgatgcaaacggcaagcatgcccacaacatcggtatgcaggccgcagggtttcatgtgcatgacattgctgtaacagcagacggagatcatgcccacgccgccacagccgaatcggctggcaggcatggtcacaccgtgtccattgatcgctttggagaacaccacaacctgcccgcgcctgcgcgtcatggcgtgtttagtcgttttgattattgtttatcaaagaacattgattatgaggatgttgcatcgtggctggtgggtggcgggcaattgtatttttgatctggatgcacgcactgactcataggcgttggtgagtggcattgccccacgatatgtggtgatgaaggtccattttttgcggttgcttttgctgtgctgatgctcagcgtggcgatgcctttaggctactgaaactttcctgatagggttgcagcgctgggatatcgtgcagcagttcggtcttcagtgcgtcaatttccggtgtggtctgcagagtcagtgcgttcggcttggtgttggtgtctggcggattgtgtgatgacatgatccccaacgcgtgctgacgtagcatttgtagctgtccaaaaagcttttgcagtttgacgcgtgtggctggggattgtggtaagtcaacgtcatcaattttcagggttccgtctggcatgatgagcgcattggccgcgggtgcacggcgtagcatgactacctggctggtgacttccaggcgtggcttggagcgttcggcgtgtgagctggttgattggctctggttacatgccgatagggcaagcattgtcagtatcaggagtagcgcgatgatcttgttcataggtgtgttgttagataaaagcacgccattagtagattggtgggtgagttgtgttggtggtttctgtcgctcaggctttttagcttttccatagcattcgatgctggacacgctgcctttagcaggactggtcagggcatgccatcctggcgccgtttcatttcttgcatgtggccgaggtcacgtagccacttgggggcagtggtttattgcgatccggatgttatgaacctagaaaaagttagagttcgttgctgcggtggcgtagatagatagcggcgatgatgaaggcgataccgacgcatacgccgatccagaggtcggaggtgtggtaaatctgaaccctttggctttgttgcagcagagggttaatgaagttatcttcgtattccttgagataattactgtacatatttgcttcactcactttcagtgtaagccagctgaagggaatgatgcttagtaggcctcggtagacgaccatgtgccagatatcaaacaggggcaggcggacatccggcatggttcccagcatggtgatcatgatgcagctcagtatcggcagcagtaatgcccacaagaagggttttgttttgacccaggctgagcagaacatcagccaacctattgtcggtagtgaccacagtagctgtttcggaatggcgtccagcatcaacgacacaatctgaaatggatgcgagtgcgtgatcattgcccatgggtacggttgccctgcgatcagtaagccgatgcttgccaccagaagtagcaacagcctggtaaccatcccaacggtcacggcgatcagtggccctggcagcagtgcccatgtgaccttagaaagcaccgtttggatatcagagattggcagcgatttccaaaacaggatggtgcggtcatggcgatcgttgtgcaggctgctcaatgcgtagaacagcacggagaaggtgagcaccacgttgattaaaaagatgctgctcagtattaagatatcgcccgcggggccaaggaagtactcggcattccccgtataaatgcttccatttgtgccgttattaattgaacgagtcaccccgatcactgtaccgagaatcccgaaaaacacggcgatcgccccagtgatgaccggggcccagaaaaagccgccgcgatgttcccaatattcgcgcttgagcagccatacgaaggtttttaatttaggcaggataagagtgttcatgcgtaggttccgttcatgaccgccacaaacaagtccgccaagcttggggtactggtggtgccgagaggggccagctgatctttggggatgccatcaaacaacatgatggtgtgacccaatgattgtttatgttcgtcgatgggtccgagtgcgcgtgcgctgtcaagtttgtcagtatccactaatagttgtgtatagcgcttggctaagttttgtacgtctgtattgagcacgagatggccatcgcggataaacatcacatcagtgaggatgtgttcgatctcttcgatctggtgggtggtgatcaggatggttctttgttcgtcgaagtagtattcctgcaggtgccggtagaattgtttgcggtaaaggatgtccaggcccaaggttggttcgtccaggaccagcaggcgtgcgtcaatggccatcaccagcgccagatgcaattgcacaatcattcccttagatagctcgcgcacccgtgctccgcggggtagttgagtgcgttctaagaaaccttcgcatttagtacggtcaaagcgtggatgtatcccagagacgaaatcaatcgcctcattgacccgtagccagcgtggcaggagcgccacatcggcgatgaagcagacctcgttcatcagtgcgttgcgttgccggtacgggtccatgccgagtacttgcaactgaccttggtagctggtcaggcccaggattgctttgagtgccgtggttttaccggcgccattagggccaatcaagccaacgatgcgaccaggtccaaagcgaaacgacagaccagccagagcaacggtatttttataggtcttaagcaatcccttggcgaggatcatcggatcgtgtcctgtggcgttcatagcgttcggttccttgcggctggtagatagtccagaggcagttgcatgtattgcatgggttctagcaaagcagcgtatgttttttgaggaagtggccgtgatcgctgttgcgtcgtgtgagtgctgttttttgagtcatcagctgctcagtccaggccgtattttcaccagattgccatcagagagtgtttggcgcatacataaccaaggtgatggggttgagtcggtatgtttcagcgacttggcgtactgacgccaggggatcactcagtacggcgagtgcgtgcaacatcatggggatggatgacagcctgttgtcattgccgttggatgtgggcattctcgccccattggagagtggtcatgagtcaacactgtgaaagcataggctgtgtgatggatgaaaggtggaaattaaggggattcacgttgatgtgtttcgctggttcgtgcttagcttcctttattccattttgaagcatcgtaaccaatggtttatccctcatgatttgagaggaggtgctgtttaagctgatgaccgtagaggtcaggcgatgcatgacaaatgacagcctgaacaatcccgtgaatgagttgcattgcagtgcgccttttatacactagcttgcaggtgatttgtgatgtaggtaaaaaatttcgcacgatatgcaggcaatgaccggtgatgcgcaagcgatggcgatacagtgacccgattgatggtgcctgctcctagggagaatagatgaacatgctcaatgtgttgaggtttcccgttttggctttggctttggctttggcttttgtttctagtggtgtactggccgatgcggggagtttgctggatttggactaccgtccgttggccggtaaagagactgtcaatttgcagcgcctttatggtggcaaggtgctgttggtggtcaataccgccagtaaatgtggttttaccccgcaatacgaagggttagaggcattgcaccagaaattgtcgccacttggttttgctgtacttggttttccatccaacgactttaaggggcaagaacccggtgatgagcagcaaattcagaaattctgcacgctgacgtatggggttaagtttccaatgtttcagaaggttcacgtcaaaggcgatgaggtcacgccactgtatcagcgcttgacgcagacgacgggtgtggcaccgggctggaacttccacaagtacctcattgcacgtgatggccatgttgtggctcagtttgatagccgtacgcggcctgatgatccaatcctgttggaagcgatcaagcgtgagttggcaaagccggtgcaggtagcgcactgattgggcacacgtgcagcaacggcttgtatccctgtggcagtcgttgttgctcccattgggaagacacgttgctgagtgaaggtgtgggctggaatacgcttgaatatcttgaagttggcagacaaaaaataccgtgaggtagcggatgacggattgctcagcgggtaacatcgcactccaatctccaagtgcgtggagtttctgatgggataaggggaacgcatggttttctgctgatggcggcaaacgggaccggtcaccgatggagaggggagagggatgcgctcattacaatgtttttttccagaattgtttgtatgcagagacgatccatcgggattgctatgcacttgttgcgttgggcaatcagtggtgactatcagtgctgttgcattgcaacccaaattcacagtttgaaacggtttggcgagcgcatgatctgcggtgattttgatgatctgcagagacgcgctgtgtgactcaacagcttcactcaacgtcgaacccctgttaccgtcaccatgttgttcttaaaccttcagctcattgttatgtctaacgttatctccaacaaagctcatgagacaatgttagcgatgccgcagtggcagctgacccatgattttatttttccaggaatcgcactgaatgaagatacaaatgcgccatgctgtcgtgtcgctactggtcgcagcaatgtcggcctccttacccgctatgtccaaacaatcggtttccgttgtgaataatgaagagaaaacggtgttgagcaccgaaaaagagaaagtcagttatgccattggtttggacattgcgcgatcgcatgtgttcgagctgattgctcaagacattgatgttgctgcactacagcgtgcgatcgaaaatgtcttcaagggtgggccgcctttgatctctgaggaggttgctcagacaaccgataccgcgctgcgtgccatgttggcagcccgttccgggcaacaggaagcttcggggactgcgccgcctgctgtatccaaagagaacattggtctcatgcttgggagctatatggtcggcccgtcgctgctggcgatcaaggatgatattgatcttccggtgcttctacaggcactgcgtaccagcttcgcaaagcgcacaccgttgatggatgaacaagaaatgaccacaaggatgcaagcatttgtggcctctaaaaatgctgcggttgcaggaaaaaatcgtgatgagggcagtgcttttctctctaagaacaagaacgagaagggcgtgatcaccaccgcttcaggtcttcagtacatggtgttgcggcagggaagcggctcacgtccgaccccaagtaataatgtgcgtgtcaactacgagggcaagctgctcagcggtcaagtatttgatagctcttaccagcgtggtcagccggccgagttcggtcttggtcaggtgattaaagggtggtctgaggggctgtcgttgatgcctgtcggttctaagtaccgtttttggattcctgctgatcttgcttacgggcagcaggggactccgggtggtccgattggccctgatgcaacgttgacctttgacgtggagctgctcagtatcctcccttaattcccctcgttttaaggagtcatcatgcgtgttgcgattttcggtactggttatgtcggtctcgttacaggaacttgcctcgctgaagtcggacatgaggtgctttgtgttgatatcaaccaagcaaaagttgatggtctcaattgtggggttattcctatttatgagcctgggttggagccgatggtcaaggccaaccatgccaccggacgactgcgttttacgaccgattcggttgcggccattgctcatggtgaaattacttttatcgctgtcggtacgcctccggatgaagatggtgctgcggatttgcagtatgtgttagcggtggcacgtaccatcggtcagtgcattgataggtcgacgattgtggtcaataagtcgacagtgccagtggggactgccgatcaggtgcgtgctgccatccagcatgagatggatgtgcgtggcgtggacttcaagtttgaggtggtttctaatccagagtttctgaaggagggtgatgcagttgctgactgtatgcgtccggatcgtattgtgatcggtgccagaagtcgggatgcagtggttcgcatgcgtcgtctgtatgcgccttttaaccgtaatcatgaccgtattgttgagatggatgtgcgttcggccgaactgaccaaatatgcggctaatgcaatgttggccactaagatcagttttatgaacgaagttgccaacattgctgagtatgtgggtgctgacattgaatatgtgcgtaaaggtatcggttctgacccacgcatcggttggtactttatctatccaggtgttggctatggtggttcgtgttttcccaaggacgtcaaggcattggcacgtactgcacagcaatatggtgtggacccgaagctgcttaacgcggtggaagatgttaatcatgcacagaagggacatctgtttgaactcatgctgcgtcactatggatgtagtggtgagagcacggtgttggctgggaaaacattcgcagtgtggggattggcattcaagcctaatacggatgatatgcgtgaggctcccagttgccgattgttagtgcaattgtggaaggcaggtgctcaagtgcgtgcttatgatcccgaggccatgcaggaggcgcgcaggatattcggtgaacgtgatgatctggtgttttgtgagaccgcgtatgcggcgttgcaatgtgctgatgctttgattgtagtgactgagtggaagcagtttcgcagcccggatttttttgttattcgagacgctttgaaagatgctgtgatctttgatggtcgtaatctttatgatccacaggaaatcgaagaagcagggttggcttactatgggatcgggcggggccgttcgttgcatgcatgaagagctactgacactgtgtgattgtgcgtttgaagcccgcctaattgaactggagacgcgtgtttctttccaagaacaagcgttgactgaaataagcgaagccttggcagaaactcggttgatcggggcacgtaatgctgagttgatgcgtcatttgcttgaggagttgggcaaggtacgcaatacactgtatgagcatccgatcgacgaaccaccgccgcactattgattattccatcgtccgttttccttacattcccttctttttgccgctatgaccaatagtttccgagaccagttggtgggtttaggtttcaagccatctcctaagccagaaagtaaatccactcccggaggaaagggacgtgctgtgcctgcgaagttaggcaagtcggtgggcgcgtatggtgcgcacccacaaccaagttccagcaacaagtcaggttccggtgagagaccgaagcggcgtctactgcattctcaggaggatattgatttagccaaggcttacgcgattcgagcgcagcgtgagaaggcggagcaaatcgagagcgaacgcttgaagcaggaggccacacgtcaacgctgggaggccaaggcgaggttcgaagcgttgatcaaggataaggtccttaatcaacctgatgcggatattgcccgttattttccttatggaggcaagatcaagcgtatttacgtgactgcagatcaacttaaggcgcttaatgcgggtgagttgggggtggttcaactgaaaggtcgctatttgctggtgacagcggagctgttggcgcaggttgagatggtgttcgcacctgcgattgcgttgaaagtcgatccgaatgcgttggaacagggagattgctctgtggatccgaaataccaagtgcctgacgacttgttctggtaagtattacgtttaatgatgtttgggatgagtgtggggatttgatgcggtgcagcagtgctcagtttctcacgtggtatgtccggcatactgattttccagctttgcgagattttagtgaagtgattaatgcactttgagatgttgtactgcttctcgcaaggataagttacttttgaggtgcatttgtctacggtgctgggcggtgtattgttcttgcggggatgatgaggctacgtggtagtgtttgttaccatggcggcgtattttgcggtgtcttcttgatgcacgtgatgtgtatattgtgatcgctgccagaaatggatgttgtcaatagtgttgtttagaaggagggaggagtacatcatttttaatgatgtcttttctctctcatgtacggcatggaataagtgatctacgagtgagtgctagacatggggttgcgtcgatatttcagaggggatgatccgattctttctatcgtgaatggtggaaaggatgagttgccttatataaatcagatgagctattggcttgattgaatggtcatagtgacggttaggtggggtgtttgattttttctggttgtggcctcggggctatgatgtgtcggccatcttccagactgtgttatgtgttcaatctcagtcatgtttattacaggagatcatgcgatgtggcaggtgttgtgctggtcgtggtgttccgctgtcttgtcgtgtctgcgctgaatgttatgcaaagcaatgtggatgccagttgccgatcgttgtcgatttttgctatgcagtgtgtccactgtgtttgtgacgcatgagcgcttcctatccttttcttcctggttcacttttattcaatgacttctaataaaactgtcagtaacaatgttgcaatggcggtagctaccacgattttttttatgtggggatttttgacatgtctcaatgatattttgatcccacatttgaaggcgatttttgagcttaatttttcgcaagcgatgttagtgcagttcacgttctttggcgcttatttcttgatgtcattgcctgctgagtacgtggtggcgcggctgggatataagaaaggtattgttgctggtttgttgattgctgcaatcggtacattctgtttctggccggcagcagtaatgcgtgtgtatgagtcattcctcggcgcgttgtttatattggccactggtatcactgtgttgcaggttgctgcgaatccatttgtttctttgctaggtgccgagcgtaatgcttctgcacggctgacattggctcaggggtttaattcgttaggcactgcaattgcacctttgatcggcggctggtttattctgtctggtacggtgaagagtgcggatgagttgcagacgttgtctgcggcggagcaattggcctaccgtgttcaagaagcgcaatcggtacaagggccttatcttgtgctgactttggtcttggtagtgttggctgcaatagtgtttctttttcggctgcctcacttaaaggaatctacagaacaaaatgttcgggggcatcattacactctcagtgacgcattacgtcatccgcatgtgatatttagtgtattggcgatcttttgttatgtcggtgcggaagtagccattggtagtttgatggtgagttacttctcaatgccacacattggtggttttagtgagcagcaggcgacgcactacgtcagcatttactggacattggcgatggtgggtcgtttcgctggttctgggttactgacgttgttccagccgcgtaggttgttggcgtttttcgcgctgattaatgcggggatacttggtgtcagtgtggcgacgagtggcatgacagcggtctatgcgttggttgccattggtctatttaattcgatcatgtttccaaccattttcactttaggtattgagcgtcttgggccactgactggacgtgcttcgagtctaatgattatggcgatcgttggtggtgcggtggtgccgtatctacagggtgtgttagccgatcatgtcggcctgcaggcgtcgttcttgctgccgctgttttgttatctctacattgtgttctatggaatatggggttcgtgtatccgcggtgtactgactgagcgtctgtcgtgagcgttgccctgtctattgatctgtctaaaaagaaaacgattctttgttttggcgaagcattgatcgatatgttggcgcagcctccggtaaagaagggaatgccacgtgcgtttctgcaatgtgctggaggtgcaccagccaacgtcgcagtggcggtcgccaggttaggtggtgcggtgcagtttgttggcatgcttggtcgtgacatgttcggtgattttctgttcgacagttttgccgaggcgggtgtggtgactgatggcattgtgcgtaccagtgcggcaaaaacagcattggcttttgtggcgctggatgcacatggtgaacgtagtttcagtttctacaggccgccagcggctgacttgttatttcgtgctgagcattttcaagatgcgagtttttccgatgcactgatattccatgcgtgttccaatagcatgacggatgcagacattgccgaagtgacttttgaagggatgcgacgtgcgcaggccgctggtgcaatcgtcagttttgacctgaattttcgtccgatgttatggccgaatggagaaaatccggcatcgcggttgtggaaaggtttgtctttagctgatgtggtcaaactatctagtgaagaattggattatttagccaatacgctcgctgcggatgcgaatgcggtgattcagcaattatggcagggcagggcgcagttgctgttggttactgatgccgctggtccggtacattggtacacgcgtaccgcgagggggcaagtaccgacattccgtgtccaggtacaggacagtaatgcagcgggtgatgctttcgttggaggcatgttgtacacgtttgcacagcagtttgatgatgccgccgcgctgattgatttttgccatgatcccgagtcgattgcgagtatgttgcgttttgccgctgcagtgggtgcgcttgccgtgacgcgtcatggggctttcactgccatgccgatgctttctgaggttctttctttgattcaagagcaatcatgactccattacctgcaactcctgttccggatttccgttcagcggatttcctgcgtacgcatatcagcgacaccatggcgttttatcatcctcgttgtatcgattccgcgggtggttttttccactatttccgcgacgatggcagtatctacaatgctactcatcgccatttggtcagtagtacgcgtttcgttttcaattacgcgatggcttatctgcaatttggcaccgcagagtatctggatgtcgtgcatcatggcttgagttatgtgcgcgatgtgcatcgcaatccagcgactggtggttatgcttggacgctttgtgatggtcgtgttgaagatgatacgaaccattgctacgggctagcgttcgtgatgttggcgtattcctgcgggctgaaagtggggattaagcaggcgcgggaatggatgaatgaaacgtggtgcttgctggaacggcatttttgggatgcggagtatggcctgtacaaggatgaggccgatacgcagtggaatttcacgcgctatcgtggacagaatgccaacatgcatatgtgcgaggcgatgttggcggcctatgaggccagcggtgagcagcgttatctggagcgtgcgctagtgcttgctgaccgtatcacccgccgtcaggccgctaaagcggatggcttggtgtgggagcattacgatatgcggtgggaagtcgattgggattataaccgtgacaatcccaagcatttattccggccctggggcttccagccaggacaccagaccgaatgggctaagttgttgttgattttggatcgttatattgaggttgagtggcttgttccggttgcgcgctccttattcgatgttgccgtagcgcgttcgtgggatgctgtacgtggaggcttaagctatgggtttgctccagacggtacgatctgcgatgaagataagtatttttgggtgcaggctgagtcgttaactgctgctgcgttgctggctacgcgtagcggtgacgagcgttattggcagtggtatgacaggttgtgggcgtatgcttggcagcacatggttgatcatcgctacggtgcttggtaccgcatccttgatggtgacaatcgcaagtacagcgatgagaagagtccggctggcaagaccgattatcacacgatgggggcttgtcatgaggtgctcaatgttgtctggacgaagccgtagcgacatgccgtaaaagggtggattgccgtgaagatgggatcgcttaatttatagagtgttaagagtttttatatcggcgtgctatgagttctagcaacaatatcatgtaatgcggcttcttcatttttaattttattgcttagcttcttgttcaaacgctgaatatttttacagacattcttgcgtgcaactttgatattgcgttctgaaatttttgtcatcagctattttttcaattcacataaaaatttcaaactctcattattcgttattcttgggatcgaaaatattagctttggtcagtcacacgtcggtccttcggtgatacggaaaagtctaatagctcgcgtgaaccgtggttggcatgattgagtttcttaaaatccacaccggcacgatgcaagggtctcagcgagagtatcctctgtttgatctgcggatataatcagattattgagcaaaatgctgaaaaccaatggatattcatctgctgctgtcacatagccgctcagcgatgaaattcccgtgagagaaccggtcttggcaataaccttaccctcggcagccgtaccacgcatccgatttcgcaacgtacctccgatgaggcgatcaggctgacctgctacaggcaacgaagcataaaatgctgcaaaccagggctttttacgcgccgctagtaggatatctgtcaatatccgagaggcaataagattataccttgacaagtcagaaccatcgacctgaactaaggactcggaattgattccatccatagcaagcacacccaaagtagcctgtataccagctgatgcactcccctgattcagcgacttccgccctatcgacttaagaaatatttctgccatcgtgttgttcgaaagtttcattaaagggataaccaaactctcaagaggtgcagactgacgccttaccaacatcaatgcctgcatcggtgtggcttgccccactactgcatggcccgcaacttcgattccatggcgtttcaacgcgctctggaaaatatcggagacaatcaaagaaggcatccatacgctacacaattcttgtatcgaatctccagcctttactgttccagatacataaatgtcgttactcccacgggctctggaaactgtgattgcgctagtattaccattgaccacacggttgatcattttcactacattattacgaggtaaaactgttatttccgtcgtgctgtttcctgttcttgcagcgctgacatcaataatgacagcccccgcattgaaatctgcgtttggagaaaaagtcagtgctgatatttgtgcttcaaagtatttatcttcatcatcaatcatccagccaaggcataatgcgattgaatcgaacgaagtatcgtccagaacgaggttaccatctatttttctaatccctcgtgctgcaagatcatttgcgagcttgtcgtagtcatcagcgcttaaggtcggatccccgatttctttcagatacaagttacctgacaaatgtccttttttctgtgttccgtcagtcataagaatagtttcgaacttataatcgctccccagcaccgaaaaggctgaatatagtgtcacgagcttaagattggaggctggaaatgttcgactccccgtattacgtgcataaagaacatcccctatttttccatcgcgtacagttaacgcaaccagactgccgacggtgcttttattgcttaaaatgatcttgtcgaggcgtgaggccaaagacgatctggagatactactagcatctgactttttagaagtctgatcttttatgtgacagaaagtaccacatccgacaaatacaaaaacaaccatagaaatcagaatatatttcattcctttgattagcattcaaaaaatctctgaaaaagaataatggatattgaggaaattattaaagaggcatttccatactttaatacaatgaaagttattttatacgacaacttatttagccatcatggaaagagttttcttcccgtagcgccacgaccgcctacgatgtcgccgatgagtggcggaatcttgttcgtgaagtatagaaggatgagcgagacaacaagcatcacaccaagcttttttaaatcagctccagtgcttataatcggttaatattggtcaacgaacgtcttatcgatgccgataatcaggagcatcgctataatctgcgcaccaagtctaagtaccgttttgtagtagtcgatcgcaatgtcttgcgtccaccgaccaccgccgaaagaacctcaatcacaatgatgatgtcgcacacacttttctaccctcccatgaggggtataggatgtttgcccaatcgctgttgcatcaatcgtcgacattgattcaacgatggaatgagcaataaatggccccttggacagaatccactagaagaagcccattaccgcagagaacctgattgtctcggtaagaaacttctgaatgtcagcctgacgtgaaagccatcatcccgtaggtccagaccatactcagcagtactaagctcccaaacagccaggacgcgtagctgagctaagtattagcgacctgatggaaacatcagagaatgttgtccaacagaccggcgctatcgacagacgtttgtgcatgcgcttgcacggcaaagcgcaatagcgccaatgcaagagcattggcattacaggaatcttcttcataggtcaccattcacgcggcttgctgggcgtgtagctgcccgactgaacctgcgcactggcggcgctacggcaattctcgtcatgcatcacaaggtcaggatcagccttacatttttcgagcatgattttccgctcgtcctcgtgctatttgtagtattcaatcgagtgcaccggttgattacacgacgcgagcaagatactccctaaacacataccaccaatttgaatagctcgtttcattagagttccttgaagatcgctatggagacagccatcgtacggccaatgttgggatatttttcaaggacggtaggcgatcagagagatcacttcgaagtgtggtggacgtttttcacgggtgacagtctctaaactggagactgtcagtgcggctttcttgatgaatttacgcagttctttggcgttgaagcccagattgacatggccataggcattgaccactgaatgatgttcgtgtctggctaaggaacaaagcagcagccgtccgccacgacgcagtacgcgggcaccttcagcgactgcctgtgccggttgtgtcgtgtaggtgagggcatgcatcagtacgaccaggtcaaagctggcgtcagggaatggcagggcatgcatatcgccttccagcacttcgacgttatcgagtgtacgcagccgctcactcgtagtggcaactactcgtgcgctggtgtcgatacagacgtaacggtgagagtgaggtgccattaatttggccaatacgccgtcaccggaagcaatgtcgagtacatcgccggtttctagtaacgggagtgcggtacgtgccagcgcttcccaggtgcggcctggagaatagtgacgttccatgtcgcctgcgactgaatcggcccagttttggtcggcggcgcgcattgccaagacgcccgcgaccccttcggcgtcttggcgtaagagtggatcgtcgctccctgtgcttaaggcataccaaagtgcgcgctgtgctggatccaacgttgattcgtcaaagcggtagtaagcggatacgcccgcgcggcggtcacggactaacccggcttctttaagcttggccaagtgggtagagacgcgcggttgtgcgagtcgggtgattgctgataattcagcgacagtcaactcttcttgttccaggagagccagcagacggacgcgggttgcgtcggcgaagactttgaggcgtgacgaccagtcttccaaatccataaatatgtctatatctcgatacagagatattctcgtttctcagtccgtctgggtcaatcgtacagctctgttaaattcttgctttctgcggtttggccgttggttcatttcttggatgtgactggatgtccagtttattcaagaattaaaaaatgattgatgatgtcttgtggcgtgggatgcttgtgtcatggatggacacactaagaaaatacttgatggggttcgaagaagtttggatcgtagtgtgggtgccgtacattttttgatggttgcaatgtttcgtcttgcgtttccagtgtggtgcaataacgtgattggtatgactgagtctggccatccttggatgatgcattggagtcttgactcttaatttgtcatgggtgttctagaggggcgggtcgtatgatgctgtgcatacgaggtgtccttcagtgctcttggactcggagtatctggagaatgtttaataggctttgatgtctcggactcggactcggactcggactcggttgtatgccgctggaccttcgcaatcgttcagttgatcgtggcctgttgaatgtccgtttggtgttatgtctctcttcacgttgttgcaatacttcattactcagcgctgtcatgacccgcttttttgtagtaagagaagagatgggtaaatatctttgaatatcaataataattggtcgatcttctatcattatcaatgttgttttaattaatggactttgagtccatgtgtgaagattaaatttccaagaatttaagattttactagttgtttgataagggctgatgttaacgcgaggtatagctcatgcccacttggcggaacaatatcattagataatctaaagcctgtcgtgagacacgatcggtcaccggacgtattattgtagattgcatgaggtttgatttgatgagtgacgtgtcggttgcttacctaatgtttgtacaggtcgcttaaagggttcaactagggtactgagtgtgtgtaatgcgatgtttctcggattgtctacgtctgcacgctctagtggctacgctaccgatgatggcaacaagaggtgctgctgtgtgggtattgcgagattccggggataggcataatgcccgcagtgtagtttccaatcattggtaggccaattgtgcctgatagaaaatctgaacccgtcgcttcttccatgggggtattagtgttggaattggccggggatacggtgcctaagcacgcagcgttgcgacccgatcaggcgggggcgctggctgagcatgttggctgtgatcttgcgcagtgggtgccgcaagtacgtgctctagaactgagtttcgctgctgtgcattttgacccggctgaggtattgcgtccggggtggccactgcaccggtatcttgaggagttgcaggcgcatgtccctcaatctcatcacggcccgcgtgtgttggcttttggggcgaatgggaagggagaagtgccattgccttttacagccgactcgactttaaatggtgggcggttgcgtgtgttgccgtttttgattagcggtgcctccgagcaggttgctgcagtggctgaagttctcgaagaggtattgctgacgcaaggaatggttcaggcgaatactgcgttgttggcgcaggctgcgttcagtgcgcagattgagcatgcgcgttatatgacggtccatgatttggttgcgatgatgtcaatacagtatgacaaccagggtcttgggatactgtggccactgttggaggccgcattactatccccgcgagctgaggagtggttagacgcaccaccacagccgctgttgcgttatcgcagtggtgaggtacggatggcgttgtttgattttgtcggctggtgtgcgtattaccagcaagatggtagtgactgtgagcggctaggtgtgctttatgagcagtttttagcccgacagaggcagatgtgtgcagtattagatgcacatggcgtcattgtgtcgtatgtggaagtcagacctgggcaagatgcccgtttagcgttggcagcttgagtgtagtttctctttaaatatagtttatgtattcaagatcatttgaaatatggtctaaaaagtttgataggttcagatcattattggatgtttttcgaacggatgtggcaagaaaagaaagggaaactaatgtagttgtgttgaatgtggtggtggtgacggtttgttttctaaattgctctgggaattcgattcgtttgttgatttcttagctagcatgttttcgctgctgaagtcgctatcagtttcaagatccagtcggtgttgtccccgcagaccgagtacccggtccaggatagtgagtagcagcccggaaggtaggccggtttcaccattacataagatggccaccccaaaatcgcgttctggtagcagtgcgactaaaccgcggtagccttgtaccgcgccggcatggaatacgagtgtatgtccattgtagttgaacaggcgccagcccaatgcgtagcttgctgccaataaacgttgttcgcgccagcctgggcggacttcactgggtgtgctgacaagtggtgtgtgtaacgtgacgagcaatggtgcgggtagcacttccggcttatgtccggtttgtgccagtagccattgagccatatcgcttgcactggcgttgacaccggcggctggtgctaagtggtaatatgtttgcttgacgaccacgggcctccatccctttttggtacgtgtatgtggtcgtgcccaactttgactggatcgtatgccagctagaccaaggctggcatcattcattcccaatggcttaaagatgcggcgttccaccgcctgttcataaaagtctccggaggcagcaaacacgacgtcgccgatcaggctgaaggccacgttttggtaggagtaacactcacctggggagcagatgagtggtgcataggcgagtttgcgattcagtgaataatagtcggcattcgactcgatttcgccgtcataggcattgcggctcaggccgacgcgatggctgaggacatcggcaacagtcaatttgtttgttgcggttgggttgcttaggtggaagccggggacgtaatccacaatcttgctattccaactgaggatgccatcgttgacaagcaaaccggccatggcgctggcaaaggctttggaaagtgaagcaaggcgaaaaacggtgtgtgcattcacaggctgcgggttgctgacatcgttaactccatagccgcgcatgctaaggatgtgccccccttggacaattgccattgccaaccccgggactttttggccataagtcagttgctcggccatcgattcgattgctttgatatcgaaacggtgcgtcggcagtgccaccttgtcttgcgtgtcgtctgagctagcgatcagcggtaacgactgcggctcgaggactggagtttgatctgtggaactgagagtgaagggcattaagctgcccagtagtccagttgcaattagacgcaaactccggtgccagccctgttgcttcattgtggccctccagagtaatcaatgacctgtgactggccggattctaccgtcgctttttcctgttccacaaatcacacttagataaatttcatatcccattgatcttagagtcgatttttattgctatggggagtgcacagttgtttgtcgagatcgccaaatgcgttttttagtgatgtggtttgcactgaatttttgcaatttgtttcaattttcagcgctatacctctatacctacagtactgacataactcaatggtcaggtaccatcatcaacgtttgtttatgaatggagcacataggtgtgttgcacgtactgtcgtgtgtctggtgatgaggaagcagattgatacgttgccgttgctaaggctgtcgttatgaataatgagcattgttcttgctgctgctcatgtgtagacggtctcatcataaggggacggtagtttttttcgttcgttcaccatccagcgtagcgtctggtcctgcgagtgaacgttgtttttaatctctagcatgaggatgtacggttttgtatgttgattgtcgtgccaaggtttgtgtggaagaaggcagcaggatcaatctaatgtcttattcatccaaactacggacatcattcttacttcaaatgtcttattcggattgtctaagaggagtgaataggctgtgttgttgcgtgcgtattccgataaacagacagcctaggtgatggtgttggcttgtgtgatgcgatggttgatagattgggagggagtcttagcggttgcgctgttcttcggtagcaagcggtgctgctggaattggaatgtatcgttgccacatctgggctgaagcagtaatcccagctgcatttcaaagtagggagtcaagcgggttattgggccattgtcgatttattagttgtagttagtagttatagttagttttcacttgctctatacaatctagaaattcagggtgtgacggtagttattattctttagtgtctaatgatggcggttttaccggagtcaatccataattaatgcggcatgcgatgatgcgtgtcaattgaccgttccccgactgtagaaaagatcgatttgaagttttgtctgcttgttgcttttatgcggtcgttgtcggactgcacccatttgagatatgttcgctccagctttttggtgcgtgatggaaggtatggtttgcttggctgatcccgagtcctctgtatacgatgattggtttaaccgtagaggcgttgtcgctattatttttggtatagccttgtattgtgttttggatctacagccgacgatagttttctgtggggtatcccggataaggagcatactatggtatagggtctgtggagactatttgcggttgaggagggcatgtgcatcggaatatagccatggcgtggtgggcatgcagtatgcagtgggtatgcgtggtttcacggcaagtagatcgccgtgtgtctcatgtttgtcgtaagtgcaagcgttgatggaaatgcagataggcgcttctgaagtcgttcaagtcttggatactggttgtgcggtgttgcctccagagtctccgttaccgatgccggagcagtcgttacgtaaggggcgtttacaggtgccacgtcagcgtactgcgccgttggggattggtttgcgtcgcttctacctgatcggtgggacgatggcgatgagtttgattgcaacctgggtgatgctcgccgtgatgtggcctggtgggatcaatgtgcttgaaggttgcttgctagtactgttcatgttcctgtttgcttgggtcaccatgtcctttgctagtgcattagctgggtttttctgcgtggtgttcggtggtggtcgtaagcttggtatcgatccgcaggtgccgttgcctgatttgcacacttacaccgcattgttggtgcctacttaccacgaggatccgtgtcggttgttggcggggttgcaagcgatctatgaatcgttggccgaaacgggacagttggaacatttcgattttttcgtgctgagtgatagtcgccgtgaagaattcggcttggcggaggagcgggagtatgctgccctgtgtgagcggcttggtgctcatgaccgaatcttctataggcgccgcgcagataacgctggacgtaaggcaggtaacatcgccgattgggtacgccgctttggtggtgcttaccagcagatgctgatcttggatgctgacagtgtgatgactggggatacaatcgtccgcctagttgctgcgatggagtccaatccagatgttggtttgattcagagcttgccggttgtagtgggtggccgcactctatttgcgcggatgcagcaattcggtgcttgtgtgtacggtccgatcattgcctacggtgtcgcttggtggcatggcgcagagagcaattattgggggcataatgcggtgattcgtacgaaggcttttgcagatcatgctgggttgcctgcattgcctggacggaagccctttggcggtcacgtgcttagccacgattttgttgaggctgctctcatacgacgtggtggctgggcgacgcatatggtgccgtacttgcagggtagctatgaggaagggccgccgacactgacggatttactcattcgtgatcgtcgttggtgccaaggtaacttgcagcacgcaaaaattgttaccgctgctggtctgcattggatcagtcgtatgcatatgttgatcggtattggtcactacttcactgcaccaatgtgggggctgctgatgttggttggcattgctatccctctggttggagatggcattgatttgaccgcaggcatgcatttttcaccagcacactattggcatggacgtacagatggggatgtattgtggatttttaccttcactatgtttgttcttttggcacccaagctgcttgcttactttgccttattgtttaaaccgtatgaacgtcgtgcttgcggtggagcattgcgtgtattgttgagtattttgctggagagcattctagcggcgttgatggctcctgttgtgatgtatttgcagtcgcgtggcgtgtttgaagtgctggctggtaaagattctggctgggatgcacagcagcgtgatgatggcaagctctcttggagtgtattgctgcgtagctacggaggtttgagcgtattgggtgtgttgattggtgcattggcgtataccgtttctccaccgctagcaatgtggatgtctccagtggtgttggggatggcgttctcagtgccggtcgtggcattgacctcacaccgtcttgtgggtgctgtgctgcgtcgttgggggatttttttgattccagaggaaacagcaccatcgaaggtcttgatacgtgtcgccgaacttcgccgcgctaggcaaccctaatttttgaatccctcctgtttggatatatatgctggaaacgatagagcacgagactgcccctatgccgcagtggagtgtgttgtggttacatggtttgggagcggatggtcatgatttcatgcccatcattccagagttggtgcgtccacactggccagctttgcgttttgtgtttccgcatgcttcggtgaggccgatcacgattaataacggtgtaccgatgcgtgcttggtacgatcttgtcagttttgatttcaatcaacgtgccgaccaggctgggattgaggctgcagttgcgcaggtccaggcattgatgatgcgcgagcagcaacgtggcattgcgtctgaacgcttgtttcttgccggattttcgcagggaggagcggtggtgctcagtatcggtttgcgttgtaaggcctccttggcaggcttgattgcattgtctacgtatctaccggatcttaacgctgtcactaccgctacagggttgcttccaggcagcaatgcgcaaccgttgtttattgcccacggacattccgatccagtggtgccactggtacatggtcagtgtgctgctgaggcgttgcgtaagctaggtttcgctgtggactggtatacctacccgatggcgcatcaggtttgccaagaggagatccaggccttggcagactggttagagcgccgttttgcgatttcctcttaactgagctgcttttgtgccgcaatcattggtgttgcgtccgtcttggttgccggagatgtgtcgggttccacgcattgtggtgttgctaggattggctgaacttgttgttgtggttgcgatgttggtgcctgatcggggcagcgtgtggtctgtttctcgtttcctgtcagcaagtggtatggcgatgtggttagcgttggtgatcggcgtgctgttatgtgtcttgcgtccgttactgttacgtctttctccgatgctgggtaagttcgcggtgttgatggtggtcagtacagtgaccatgttgggaactggtgttatgcatgtgttgtatgtttcccttggtcagcggcctatcgcgcctgaggtaggattttggcgttataccttgggatgtagcgccatcacactactgatcacaggtttgttgctccactatttttatgtcaatgatcgttgggttgcccaactacaggcgcatgcccgtgccgaggtgaatgccttacaggcacgcatccgcccccattttctttttaatagtatgaatctgattgcttgcttgctgcgccgtgatccggaaattgccgagcaggcagtattagatttatgcgatctgttccgtgctgcgcttgatgcgggggagcgcgagtctaatttgcgtgaagagtgcgaattggccgagcgctatcttgcgattgaatcattacgtttgggtgaccgattacaggtacgttggaaacgttttgagccgctgccatggcagttaccgttaccgcgtttggtgttgcaaccgttattggaaaacgccattttgcatggcatttcccagttaccttccggtggctgtgtggaggtaagcatatgttgcgaagcgcagcgtttatatatccgtattgtgaatccagcaccgtctccacagcggctggctgcaggagcagggcatgcacaggccagcattgcgcatcgtcttggttaccgctttggtcctgatgctcgaatgacggggttttggagtggaggttactattcctgcgatatcgtattgccgttgatatgatagggttgattgggaggttttcagtttgctgcgtatcttgattgccgatgatgagccgcttgcgcgtgagcggctgcgtgtgttgctgcaagcacaaatgcaacatttagaggtggtggctgaggctgaaaatggcgagcaggtattacatgattgtcagcgtctgaatcctgatttggtcctgatggacattgctatgcctggcattgatggtttggaaacagcacgttatttacgtcatttacctgcttgtccagcggttgtgttttgcactgcttatggtgatcacgcattgtcggcatttgatgtggaggcgattgattacctgatgaagccagtgcgtgcggaacggcttcatgcggcattgaaacgagtgcaaaccttcgtggctggacgtttacgtgaaccccagacctcgtgtgatgagacaccacgtactcatttgtgcgcgcgtatccgcggcggattgcgattgattcctttggatcaggtgcgttatctacaagcagatgagaagtacgttgtgatctgtcacgagcagggggaggatttgattgaggaatcgttgaaatcgttggaaaaggagtttagtgacaggtttgtacgtatccatcgcaattgtttgattgcgcgtgccgaactgaccgagttgcgtcgttgtagcgatggacaggtacaggcagtgcttcgcaatgttgttacaccgttaggcgtgagtcggcgttgtgtccctttgctgtgtgatcagttgcgtctgtcggctgttttgacaggtcgctggtaataccacgattaccacgatgcctttacttcgtattgctacccgcaaaagtttacttgctatgtggcaaagcgagtatgtcgctgcgcgtttacgtatgctgcgccctgatttagatgtggtgttggtgccgatgagcactcgtggcgatgagatcctggaccgctccctggctgcaattggtggtaaagggctgtttctcaaggagctggaactggcgatgttacgtggtgatgctgattgcgcggtgcattcgctgaaagatgtgcctatggatttggagcccccatttatgcttgcggcggttttgagtcgcgatgacccggccgatgcgctgatttctaatgtctacctttcgctagagtcactcccaattggggcgcgtgtggcgacttcttcgctgcgccgacaagcccagctacgcttttatcggcctgacctgcggttgtttgacttgcggggtaacgttaacacgcgcttggcgaagcttgataacggagattacgatgcgattgtgctggcttgtgcggggttacgtcggctgggattggagcaacgcatgacggctcggctagcaccgccagaatggttacctgcgccaggtcagggggcgattgcggtggagtcactgaccgaggatgctcggatcggtacattgttggctggtcttgacgatctgccaacgcgccaatgcgtggtggctgagcgtacgatgaatcgtgctcttcatggtagctgccatgtgccagtgggggcttatgcatcctacgaagttggtggtatgcgattacagggcttggtgggttgtgttgccgatggtcgtctcgtgcgtgcggagctgtgttcggcaaaggatgagggcgatatgctcggcagggcagttgcacagtgcttgttggatgctggtgcggctgagttgctagccgccactgcataggatcctttgagactgaacatgctgtgtagataccgcccacggcaagatgatgattatttgaaactgtagaccaagttcactgtggtcaatgtgtttgtttttttatcgttttcattgacttcggtattgtggcgtagttgccaagctgctttgaacgcgaagcgttggctcattgcgacttgtacgcctaggtcgttttgcatgtaattgttgtaggcgccgacttcgatcagcaggttgttgatgagatcggtgttatcggtgatgtggtatttcatgtcgagtaagccacggccaattggtccgatttctgtccgtaccagataggcgttgtgagcgcgacgtatgcctggtccgacttgtgtgtccagcgagaaacggtttccgttgatcaggcgtgttccatagccgatgccgaaggtggtcaaacggtcgtaggttgcgaatctgtcacgctcgtgccgacctgtggcggtgagttggcgaaattcgcccaactgtaatgctgtgccaacagcacctgtatagcgctcaacggtcgtttggcggtaacgatggacgctgccgtcttcagcggtctccgtataatttgaaatggaacgattagcaaataagtctaatgagtggatccagtctccttcgttgtagcgtgctttcaggcgcccgttaaggttttctgcggtactgttaccacgcgaggaagaaaagcccaattcaccgctgctgccggcccatggtgattgcactactactgcagcaggatcgcttgggttgtttgggatcagcgatgcattgcttgtttgagccgatgtggcggaggtacatagcagtaaaggaagtatggaaaatgatgggcgggacatagatgcttctctgggccgggatcgattggacttattaaacatattggttatgaaagcggatgtatcagccatcgctaattgttacattaaataaaagatttttactcagcttttgggagcgacgcttagaaaatatttagagcctgtattgtgtttaatttttatgcgctttgaccttgtcttgaattcttaatagcttgccagtgtaagcggtggctgatattcatggctgcggttgtcagccaccaactctgccgtgaaagtccgttgaaatgtatacaagctgattagggacattatagacaggatagtgtaccgatcatcggcatgaggcttgatagtaaaaggggatggtgaaggagccagaattgcttggcgcttctggctaaagttaatgatgctgcactggtggcaatgtgctgcgagctctgatagacaggagatacagcgctgattagatcggtcatgatgctcttagcgtcagtattgtaccgagcatgagagcagcgcattgcattagatgggttgatgtggtgtttttgctgccaagggataaaagagtggccctggtttgtgcccataacagtagcgctagtctgagttgacccattgcagtccagggggatgtgttttcttggttggtatggttcaaataacaacgtttggtgatgggcatagaagcggtagccgttaacgtgaagctcattattagcagttaaatcattgctatttaaaaatagtttttgggagtgagagtcagtatttcgatactacgcctagcggcacgttttttgagaaagatgttatgtgttcatcgtttggccactcggacataatctctatatggatctttatcaacgtatcggtgtcatgcactgtttattgaagtcggtgtcttgtccaattggcgtgttgcgctttcaggatgaattgggtttctctgctgagacggtctatcatgatgtggccttcatgcgtaatgtgctaatggccccgattgagggggatggagagacggggtttttttatctcttgagtgagggtaaccagtttgagttaccgggggtatggttcaattcggaggagttgtacgcgttgctggctatgcaacaacagttggcatctgcatctacggatggtcttgtatcttccatgctgttaccgctgcaacagcacattgaaaatttgttggctgctcagcctggtatgccaccttggcaagtggggtgtgtacgcgtgatctcacaccgaaatcgcaagttggaccaagtaagtttccgtatcgttgcttctgcggtgcttgagcgtaagcagcttggcttttactatcgtgcgcgttctactgacgaagcaagtaatcgtgttgtcttgccacaatgcatgatccactaccgcggtaattggtacctcgacgcttgggatcatggtcgtcagggagtacgcagtttcgctatggacaggatctatcgtgctcggattattgacgtgcaggcacatgatctacccggtagcgatctagaggagcagtcagcgggtagttacggtattttctcagggttacccaaaggctgggcgacaatcgtgtttagctccaaagcggcacgttgggtcgctaacgaatactggcatgttaaacagcgagggcgttttcttgtcgatggtcgctatgaattgcaggtgccgtacagcatctcgcgcgaactgttgatggaggtgttgcattatggttcggatgcagagattgttgagccacattacataaaggaccggctcgctgtactggattccagagaaagaggacgaagtagctactgtaagtgtgccagtacagggtgctgtccgcgttcgaggtgctagacgttaatagagcgtcttggaatgttattgaactcaggatttctattttgatgcaaaggtcagcgattgctgtattcccgctgcatttgcttcatcatgcagtgcatgacgtaaaagcaattaaaaaatatgtaagtagtgaagtgagccatactaagatctgacactttctatttctatatgtagtgttattcttgggtaaatcactaattaaatttaaagtgcagcccttataaaggaatgtgtgtgggttgcaccttgctttattagattgaagtttggttgaaatcaaaacgtttattaagacaccactcatcgctggagcagtggagcaggagtttagggtcactttgtcaagcaatgactcacgcatgttgcttaagtgtaacggcatcgtatgtgcgaagcgtgcggtctggatagatatctaggtgtgtcactctaattgcatcgtcggcgggtggttattatgaaggtattaatcatcactattgattatataacctcataatagatttatgacatttctgcaatttctactccatcgaatccttgactcagagttttggcgtcttttccatcggagagtttaatacgcaggcgtacctcgttctgcgaatcagcatggcgtagtgcctctttatagttaatggctccgctatgatagagttcgaccaagctttgatcgaatgtagtcattccaagatcgttggggttttgcatgacttctttgagcttatggatctcgcctacgcgtatgtagtcctgtactaatcgactgtcgcgcaaaacttccgctgctaaacagcgctctttaccatccggagatgggatcaattgttgagcgatgatgccttttagattcagcgacagatcagtcagtaattggctgcgccgctcttccgggaagaagttaataatgcggtctattgcttgattggcgttgttggcatgtagggtacacatgaccagatggccggtttctgagaacgagatggcatgatccattgtctcttgagtacgcacctcaccaatcacaatcacatctggggcttggcgtagggtatttttcaaggcattttcccaactgtcggtgtcggtacctatttcgcgttgagtgatgatgcatctctcgtgcttgtgaataaactcaatgggatcttcgatagtgacgatatgtcctgttgagttgtgattacggtggttgatcattgatgccattgaggtcgatttaccactacccgtggcacccacgatgatgatgatgccgcgcttctccatgacgagctccttagcgacctgcgggagcttcagtttttcgaaggtgggaatagacatctcgattctgcgtaacaccataccaatttggttacgctgatagaaagcgttgacgcggaagcgaccaatgttggtgatgtcaattgcgaagttgcattcatggactttctcgaattcctcgcgctgcgcttcactcatgatattgaagactatgtcacggctttgctctgaagtcagcggtacttgtgtgattggagtgatattgccgtgaatcttcattgaaggcggcattccacaggtaataaataaatccgacgctttttggtgcgccatcagcttaagtaaggatgtgaaatcgatggtagtcatcgggtgttgctcctttgctgctatgccgatagttggagaggagcaggcgctccgtgttgcggtgtctctccagctttcaatgtccactttactagggcgttactagggcgttttgaaggggggactgcttagtttgcattttatgtgtgatagtgcggtatttaatcaaaaattcgctttatccttggcgtattcacgtgcttgctgtcgtgtgatcaggttgcgtttgatgagatcctgtaaatgctggtcaagggtctgcatgccatattgctggccagtttggatggatgaatacatctgtgcgactttatcctcacggatcaaatttcggattgcgggggtgccaaccataatttcccaggctgcggtacgtccaccaccaacttttttcaacaacatttgcgagatgatcccgcagagcgattcggaaagcattgagcggaccatcggtttttcagcagcgggaaacacgtcgatgatgcggttaatacttttcgctgctgaattggtgtgcagggtgccaaataccaagtggccagtttcagctgcagtcagtgctagacggatcgtttccaggtcacgcaattctccaatcaagatgatgtctggatcttcgcgcagtgctgagctgagtgctttgttgaagtcgtgagtatcgcgatgtacctcacgttggttaatcaagcacttctgtgaggtgtgaacgaactcaatcgggtcctctatcgtgagaatatgcccgtgagcatttttgttgatatggtcgatcatggctgcgagggtggtcgattttccagagccagtcggcccagtcaccagaatcaacccctgcggttcttcaatgagtttgcggaacaccggcaaacagccgagttcgtccaatgtcatcaccttattgggaatggtgcgaaacacggcaccagcaccacgctcttggttgaatgcattgacacggaagcgggagagtgaagggatttcgaacgaaaaatccgtctccagggcttcctcgtagtcgcgtcgttgcttatccgacatgatgtcgtaaattagcgattgcacctgcttatggtcgaatgcagggatattgatacggcgtacatcgccgtccaccctgatcattggtggcaggcctgctgacaggtgcaggtccgaagcattgtttttgactgaaaacgctaacagttcagcaatatccatatgttctttgccccttgcatagacgacgaatggaagaatcctattcggcgcgcagtatagcgcacgcatcacagtggtggtgtgccgttatcaagtgctttttgctgtaaagcccatgtgatttttgcagttgctgttggtgctgaatgttctaaggaggtgcagcaatttggaagatagatgttttttttacgtagcgctaacgtgttttcgatacagattttctctaaacaagtggcaggaaaaaattgcaccactgcaagcactcagttttagtgccctgttattggatgcgcgttgttgaatacatccattctgatagggcttatcaagcgatccacaatcagatcggcggcctgagtcgcttagccactcgactccgggttttcctgtacttcattgattgcttgtgcttgcccaggagatagaaagaaggtgatagccatatgattggctgttccttcgctgtgagaaagtaatacatggtgttccacccgtcatcggattttctgagagtggcaggacaaagcggcatataagatggtgtcgagcacctttagattcgtctaactaaagtttctgtttgcattcaaaatatcgacatattgtttgttgcgcgtgcacgaagtaagcaaggatggcagcttcgcagcaaggtaaagagcatttctggtaaggccaggggcgagcagggaccggcagtgttcaaccactgtgcgttctttgtctccagagtggcactggttccagccaattgatgcagttgatggtgatcaaaggagaagcgtatgacatctgttgtctgcttgctctggaaggttcggtagttggtgatgtgttggtagggtgagataacaagcgacaaatatcactgatgtgccacatgatgttgttgctgatgttgtgcttttcccgttaagtttatttggtgtgattaaacatgccttgatctgttcgtctcctgatatgaaaccacactgctcttaactctgggtcggcttcatggggtggttcggaacagtaggtagttcatgcaacaatatctgatgcgggttatacgatatttcggttgtttatcactggtgtgattgcttttaaactgcggaacttattcagaatgaccagacgcaatctatcgtttggaatgtaatgccggtatggaaacgtcgcaaatgtcggctaccatttttaattgaaggttatgcatggatgactcagcaggccattcgggcgaggataatgcgctgatggatagacatttcatggctgcggtggtggtcaccttccagagtggcagcaccattgatgtttgtttgacacgcttgcgtgctgctaaagatatagccgagatttgtgtggtcgacaatggctcccacgacgatactttgaatattgtgcagtgtcatgcctcgaccgacccacgtgtacgttttattgccaacctcgataatcccggatttgctgccgcttgtaaccagggtgctgttgatgtcagcgccccatggttggtttttgtcaatccggatctgatggttgagccagagatcttggcacagttacgtgcatatgctgaggtgtatgtcccagcgttgctaggtgtggaacaggtcgatgaacatgggtatccggatcctgcagtacgccgacgtgatcccgattttgcggcgatgctgcgcaatccgcgccgcgggacacaactggcaatccctgctgatccgactcagtcactgcaactggtaccggcattgtccggtgcattgatgttgatgtcgcgtttgctgtttgagcgccttggtggctgggatgtggggtatcgattgcatgccgaggacttggacttgtgccgacgtgcgcgccaggttggtgctactgtcgcggtggtcaatacattgcaggtggtacatctgcgtggtgtttccagtcgttcgcggccttttttcgtcgagtggcataaacattgtgggctatggcggtacttctgtaagttcgaagcgccgcagcgcgggttaccgatacgtttaggggtctggcttgcgatctggagtcatgctttcttccagtgtctgggtgtgtggctgcgtcggcgttaaccagggatacggcattgtgtggttattacttactacgctgcggtggaacagtaagggccagcgactcgcagcggacgcacccagcatcgctttctattagaaaatcttgtggtaggtggaacagtaaggaccatttcattatggaacatgcgtgcacagtccgtatcttttctctatcccctgagaagcaccctgctgtgctggaaggtggcaaatcaccgttgctcaagcggtttggatcgttgaattactggttgtacgtattgatgaagatgagcaaagccaacaatgtgtgcttggtttgtgtttgtggtgccgttgtgtatgtggagtgtggcgttagcatacgaccgcaagaaagcgtttgtctgactctgacaaagaatgatgtaactttcagaaagatattcattgctggacgttgtgaggcttatcagaaagacaaatcagcaatagaaatcactgggctaaatgggtgtgctcgaataggtctgaatatgccgaggtcaatatttgtacgttctggattggggatggttgaacttccctgcgtttttataggatgtgtgcacctttccaatgccaatatgcacagtgcatgggagcatggtttcaattgcagtactgaacgtcattatgctaatgagcacggattgacgtgtgttaactttctgcattacgaatatgtaatccgtgatcagcctgcattctttcatctggattgtcgataacgaccggatgcgcttgtgtgcgccaatactcgtggattacatgaccgtaacgccagatttgtatggcaacgtgagaggtgattttccaaaggtctcgtaccattcgaaaatgacttttgcgaaagacattcggcgaatggggagtgctgtaacgcgcttctattggcacagcaatcatacgtgcgccagcttggcgtgcagctgagatcaacaattgtgcctcgaatacgaagtcttccccggatacatcaggcagggtaaatacagaggctggatagaagcgctgcccgctttgagtgtcgacaatgcgacagccgcaaccccagctaattccccaatcgccgaagtgattacctatgcgtcggatccatggttgttcggagcgcttgcgtagtcgtgcaccgatgatcacacagccaggatgatagttagctgcggctagtaggcgggggaagtcggcagcactatgttggccgtcgccatccatagtgatcactccttgtacgcccagttgggtggctgcggcgaagccactgcgcagtgctgcacctttaccacggcgttgtgggtgtcgtatcaggatgatcggtagatcggagatgcagttagcggtgccatcgtctgagccatcatcgacgacgatcacgtgtggacaatacgcgagtgcgtcggtgatgaccttgcggatgctgagtgcttcattcagcgctgggatgatgattgcagtggtatctgtggtcagcacgatcttattcaacgcagcaattccacatgtaacacctgatttgggccggcgtacagcgccgtttttgtatccatgctggccagtgcatcgaacaacggtaacattggggccatcgcgttagttgcggcatgtcgtgccagtggtccggtttccgtaggaggagggccatcgccgaagcgcgctcgtaatcgtatccggtctggacgggatgcgttactcaatactaaggcacctgctaataggccatgactgcacaatactctactgaaaggtcccaccgcgtagctatcgtagccgaccacaagcactgctttggtacccattgccagttgtatgagtccttccagcaagccttgggcaaagctggcttggccggcgctgagtgcagtagtgggtgttagtgcatgcgtaccaatggtccaatacgcggcggcggagttatgtacggaattgtggaacttggttggcgatacggcaatcggctccttggccagcgtcgtgcacatatagtcagcgatttcttggtcgccataggtggaggtgaacacagatggtagttgtgctggatcgtactcagcatcaatgcaggcagccagtgccacttctagggatacggcaacggtgttcgatgcacgtcggcgctcgttagcggccagcagttgcggggtagggcaggctgaagctgactgcggtgcagcaccagcaacaaaacggcaggcggctgcccagctggggagtttgttgtaccaaaagccgatcccttcgacagtggcgcttagcacgctcatgcgtccgctcttttgaataacaacgcgcaattattacctccgaaaccgaaagagttattcatcgcgtacaggattggtgtatgtgcgttttcgcaacggatctgcggtccgcacactgggtcaagctgttcgctattcatggtgccgggcaggatgtttcctcgcaaagccaagagtgcaatggtcgattcaacgatgccagaagcgccgagggtgtggccggtccaggctttggtcgaactggcatgcaatgtcggcgggaacagtgcggctattgccacggcttcaatactgtcgttggcaggactggcggtgccatgcaaattcagatagccaacttcactggcatctacgttggctctggccagtgcttcttgcatggccatgcgggctcctaatccttccgggtgtggtgcggacatatgataggcatcgctggattcgccgtaaccgcacagcaacagatccgcatcgggtgctaggtcgagtctttccagtagtgcaaagcctcctgcttcaccgagtgacagaccggcccgatgtacatcaaacggacggcatggttctggtgaaactaattgaagtgcgttgaagccaaacagcacactgccacatagggtgtccacaccaccaactagggcggcgctcactacgcctgaggtaattaggcgtgctgcttgtgcgaatactttggcgctagaggagcaggcggtcgctacggtaacgcagggaccgcacaggtccgtggcgtgttgtacaaagttgcctagtgaatgcggagcgtggatgacggctctttgcagatcgtctgggaagcgtgcgccctcggcatcgtattccagtcgggtatacgcctcttcacttgcgccgatgctggatgtcgaggtgcccatgatcaccgccatctgtgtttttccatgccgtgttcgtgcgtttgcaactgcttcggaaaagttatcttgctgcagtgccagccaagccagccgattgttgcggcactcccagggatgcaatgcttgagggagcgtcatggtttccaacccctccacgtccccgatccagcacttaagtggatgtacgccaaaatcattgcggcgtagcccactacgacgtgtgcgtagtgcttcattcagtgcggcttgcccatgacctaccgcagtggtagcggtgaaggcggtgatagcgataggaggcatacgtgctgaagtttgcaatgaactcattcgaacagattcgttgggcgtgaatatttaattagtatattgatgctatcaagccaggctgtcagttggttgcaatattaaggcgtggtacttctgggattccctggtgatttccgccacaatttcattcaaattcaaacttctgtgtagctacatccgcatgcatgatttgttcataaggtttaccgcaaccaggagacttgagtgtatttgtctgattacgtttgctatatcgtcagatatggcgcgtgtgcagcttctaatgttcacgttcgtacttgaggtcacattgatctctgatgcgtgcttggcgcacagcgttcggatgaaagtacaggaccaactgactgaatgcgatctgactgaatgcgattttctattgccgctgtgtttgtttcgatcagtcgataggttgggagatgattgagattttacgcgtgcgtacaccgctgaaattgtctgtgttggtgctgtccctggcagtgctactgcatctgcttgctggttttgggggcgtggccgtgctggcgttatggggagtgcaaccgatgctggcattgggtgtttcctggttacgtggtacacgcccactgcctcattcactgcgtgagctgtggcggcaatggttgctgcttgctgtgttgtgggctgctggtttgactgtagtggtgttgcctgcgttgtggccactggcggtgttgtgcaatagcggtagtcttgagggggcattggtgttgagtgctgctgtcagcgtcagtctgctggtactgtggcgtacttggccattatggccgcagatagagcgtgggccgtgtacgtttcgcagcagttggtacgtttttccaagtcataatttggcatcctggtcaggtctgggtatcgcagtgctggtcctgatgatcggttcagtagcggtggcgctggcttggcctgggttgctcacactatccctgcgttgggtattagctgttgttgctgccttgttggcaccggcgatgcacgtgctgttgcaacgtgttcaatcgcgtgggttgacagcaagggtggagccgccaacgtcaagagaaccgttgcccgaggtgacggccagcccagagacggtgccaccgatcccaagtgaccggcttgtggcggatttgtatgaagcagcccgcaccggccgtgttgatcgtgcgttgcaattgcttgaggctggtgctgatccacatgcactgccattcgacaacgcacgtgatcaacgtagtctgatggtgttggctgcaattttgccggacctgcgtttgctgcgtgagctcatcgtacgtcgtgttgacgttaaccagcgacaccgagggatgacagcattattagccgccactcgtgatagttggcatggtcggtctgaggcggtacagacgttgctggcaaatggtgctgatccacgtgttgtcgatgctgatcgtaatacacccttacatcatgccgcccgcagttctgatcctggggtggcggcgttattacgtgatgcggcggctgagttggatgcgctcaactgcgatgggttatcgccgttggctgcggcttgtcaagtaggtaattggcgcttggccaagttcttgcttgaacgtggtgcccagccagagccgattggaggcactccggttttgttggctgcggctggtaccgatgaggatgatccaaccggcgtactgttgctgctgaagcataaggctcgggtggatgcgcgtgatcgtttacgtcgcactgcactccatgaggctgccgaagcgggccacagtgagattgtcaaagcgctgctggaggctgccgctaacctggaggtgcgcgatatggcgggacgcacgcccttgctagaggcagcccggcaggcacgcattgtagtgttggagtgcttgttgtctcacaaggccgacaggttggctgttgatagtgagggccgtaatgcggtgtttttggcttgcttgtctgagcgggtgactctgccgctgatccggcgtttgctcgaaattggcgtgccagtcgttgcggataagcatggccaccgtcccgttgacattgctgccaaggttgggtgctggtcgatcgtatccctgcttgatcctgactatcctcttccggtggtcgtcagtgaatctgtcagtgtcggtggggtgctggatcgcccccccctgacgttgctgcgtgatggactacagttgggtagttttggcagtttgtcggaattaattgagctgtgtagtgcagaggagttggggacgcttttgcacgatccacactttgcgttgaatcccgatgtgctggattggttgctcactcatggagctgcaccaacggtgcccaatagctctggtaacgtgccgatgttttcattattggcgcgtggtattgaggcagtaccggccctgaaggtgttcttgcgtcacggtgtatcgcctgctggtgccggtgggttggggctgtggttggctgcctgtatgcagtgtgatgcggcctcccgtagtctggagcagtttgcctgcgagttgttggagcatggtgctgatccgttgatgccttcaccagatggcgattctccgttggtgcttacagtgcggttcggctggttacgtttgcaacaggctttactggaagctggcgtgaattgtgaggtccgtgacagctacggtatgacagcgttgcaccaagcaacggtccttggtcgtgaagcggctttgaagctcttggtgatgcatggtgcaaatccggatgcacgtactccagacggccagacttcgctgggtatggccctatccagtggtaggcgtgatttagctacctggctggactggcgtagttggcccctgccgcgtcgtccattacgacaggcggatgttccggatgcagcgatgaggggggatacagaggcggttcgtcgcttgcttgatttggggttgccggtagatgcggttgatgcgcaggggtgtactgcgttattgcatgctgccggtggcggccatttgcaagtggtgcgtctgttgttgatgcgtggggccgatttacagcatgccgccaacaatggcgccacgccgttgtcggcagcggtaagcatgcgtcagaacgagatcatccctgctcttttggacgcaggtgctccacttgaacaccgttttccggaggagatgacggtactgatgttggctgctgcgctgggtttcccggatattgtgatgcgtttgattgcggctggtgctgatgtgcatgccagtaacgtgcagggttttgctgcacttcattgtgcagcgttatatggttttagtgctcgcgacaaaacgcggttcttggcgttgttagatgcgttgcttttggctggagcgaatccgggacagcttgctgacggtaaaatcactccattgctcttgttgcttggtgcgcgtgctgaacgaggcgcggtttgtgatgagcaagtggtactggctggagtggagcgcctccttgaagagggggacactttagacgtggtagacacacggggttttggtccacttcatttggctgcgctacatgggttgccgcttttagtgaaatgtttgttgcgtgctggcgctgattcagagcgtcgtgacgcgctcaatcgttccccgcgtgagattgcaatcatgcgcggtttcattgatgttgctggacagtttgagtcggagcaactgggtgttgcttcgatgggacggtttttacgtgatgagtgttgaggtggcttgttcttgctgtagtgttggttgttgattggaaacgatggtgtctcgttagatgcgcaatacggaagtgtgttgcttcagaacgggtagtaagtgggtgtattgtttcgctgatattgcttcactcgactgagcccccaaggggaccagggcttagagtggttaataaaaataattggttcagaagtttttctcagcggtatcgtagtatttccgtgtaaatagatctgtgatccaaaaaagggcaactgctctcttttttcattgtttgagtgccactctgttatctgtattcagagcgatagtgcaccgcgcactttaaatttgatcgcaattgtcctcgcggcgtttggggctgatggaaatcagccttgtgacatcaagtaatgctgcaaaaaggtgcatacctccaggtgcggctaagtagcggggacaccaattgggtgagaatttggctttgaagcggcgtagaccactgaagccgtagaagcgttcgccatgccgtgcgattaggttggcgaaccgattccagcgccccgctaaatgatgttgcgctaagcccgacagtggcgccattcctaaagaaaaccgttggaaaccttgctcttttccccacaggaacatggctacgaacaaaaagtccatcgtgccattaggtgcgtcttggctatatcgcatcaagtctattgatagattgctgcctggttgtgcttttaaaatgtttgcaaaggcgatgattttctgttcagcttcatgctcaatcaccgcgactggaaagcgatataggtagatgggatcgaaatttcctagagaaaaacttttctcttcgctgcctttttcttccagccattcgtcagagatctgacggagcctatgcatcagtgctctgacttcttcttccgaaagaatacgaaaacgcaatcccagtcgtttccctttgttgaatgcttgccgcatttcggcgttagtagacccttcgaggctgaatttttcaaggtcaacgattgcttcttctccaatcttgaccatagtcatgcctagatctaagtaattttgccaatagttgtcggcgacttgataaaacactgggcgtaatccaaggcggtcggcgacttcacggaagcgccagatcagttggatcgatgcttcaggtggcccaatggggtcacccattgcgatcagtgaaccgccgtagcgctgcatcattacgaagctgcgtttctgtgggtcgtgtagtaacgccttatccccggtcatggccaggcaggcttttgtgtctttgttattggctagtatcggcaataaggcttgcaactcagcttcactggctggcgtgaagggtcgccgggcgttatgtagtaaacgcgccataccgaacacgatgaggcaaacacatatcaataacaatgcacgtagtgcgcgtggcgcgtttccagaggttgcaaactcccaccacaagtcgttgctgtactcaacgtggctatagacgaagaacactagccagaaggtgcttactatgacgatgcctatattgctcaaccagcgccacgaccaagcttcgtcgagcagggcactctggcggtaaaactcgcgccgcgccatccaaagtgttactgcggtcaggccagcccacagtgaaaccgagtagtggctaccacgtaacagcgccagtggcgggagtaatatgcagatgcctaaagctagcagccaagctgagtggctacgtcgttgcagcccttggccaatgagtaataggacaatgccaccgagactgactagtaaatgtgaagtctcaatgagggggaggggggcgacctcttgtcgtgattttggtgtcggtaaggtgccatcaaccagcagtatcgtaccgattgcaaaaacggctagtgcgatgatttgggggacccaggggcgtacggttttccagattgcaattgcggtgccggcgctgactcgcattggttggcgcagaccgctacttgcagccatcgtcagcgcaatgagggtaggcaagaggtaataggtaatgcgataggccaacgcggctgccagtactacgctaggcggagtgtgaggcagaagtttgagcatgctccattcgaagacacccagtccagccggcactgtggatatcaacccagcgacaacagcaactagccataggccgatgaagccgaagaagcttgtgttcgcttctgatggcaatagcacatagaatgcggcgcaagctagacctaactcgacgatactgagtgcagtgacgcctagcacggtgcgtctatccggtatccaaaagcgttgccgaccgatgccgaactctcgaccgttgctgttaacaagccacaacatcactaggaatgcggcgagtaaggcaatacctgtgctgcggatccctagtgtgtccagtggcagtattggtgtcgctgtggcgggttcgagtgctaatgccaagcccagtagtacccaagcaccaaatatgaagcccaaggtgctcatcaatactatttggccgatttcaatgaggctcagtcccactttgctgtagccacgtagccgcactgcaccacctgtcagtgcggcaaagcccaatgtctggccgattgtgtgggcgaggaaggcggtaatcgccacccgtgcaggatgtggacgtttgccggtacgttgtaaaccgatccaatcgaagcctaccaagcaggcgtagctacatagcccaagtactagggtcagtacgatttgccaagtggtaaatgctttgaatgctaagtggatctggtgatagccatgattagtaaagtggccagacaacgcatgtaacgccatgccgagaatgagcagactgatgaataccggtatggcacggcgccagccagattggcggtggatgttgtgggtgctgctgttatctgtcatgagtcggtcattcctcaagagaacatatccatttccagactgttacttaacaataggcgacgcctcaagggcgacagattgagaagcaaagtatgaaaaggtaggaatggcatgatccattgctgtcctgtcagtgtttccgaatgacatataaatcattccagcttaattcataatttttattgtagcgatcttgctgtagccgtgctatttcttcgatctacgctctagggggtgcagttgggtgaagggagatgcatataatgcatcgtgaaataacccttatcccgttaaatacataaataaatcaatcaattaaatgactatagccgctccgcaatattggaagcgctccgcaattcaccgagtaggagtgaccttcgcccctttgcgcttacgtacatagtgctctgtcatcaccaccgaggcatggcccagctgtgcttgtgcttggcgcatatcgcccgccaaatccgccttatcggtcgctgctttggcgcgtagatcacggaattggaatacctccttggcgatccctgcggcagcgcgtactttcctaaacctgtaagctaactttttccaattcaaccccaagcctttttcatccacaatcaaacgtgtactacgcagcttcatgccacgtttgcgggcaagaatacgttttatcaaaatcgctaattcacccgtaatcgcaatcgctaatttcacccccgttttagcttggcaaatctccaaagcgccattaacaatatggcgctcatccatagacaccacatcgctcacacgctgccccgtcaggtaggcaaggtccatcgcatccctgagcgtttgatccgctgcttggtaaacagcgtggtacgttgcatcgtctatgtatacatcgcggcctgactccttattacgacggatgcccgcacaaggattgggaagatcagtgattcccttactccgcgcccaattccaaagatgtgaaaataatgctacttcacgattagcgctcacctttgaggtgcgccagtccagatactggcggatgttcaccggtttaatggactcaaacggcgcggggggatcgtcaaaaaactgcaacaggtagttcaaatatatgtggtgcatgcgttgggtgttgtgcgcctttgttgggatcacctcagcgcggtaacgctcggccacatggcggaacgtcaccgcaatcgcaggagtgatctgcgcatgttccagctcagcccaccgcttgatggctaacccgtagtcgcgtcctagtggtgtctctttgcgtggtttgccgccatggtcgtagtagtaatgcacgacgccggacttctgagggcgcacgcgaaacctcggaatcgcacctgctttggttggcttacgtcccacaagcgaccttattagacttccacacaggcggaaccatcggagatggcggcatcgcgtcaatcgcagcacgcagcacgaccggccagtcatgcgcatccagataatgccgaatgccgttcttcctaagaaaggcggcttggcgagcgcgttgcggcgtaccgcataactcggccacctcacttctggaaagacataaaccagcggctggtggcatgtctcgtagttgtcttgcttgcacattaaccattgtctgatccctgctcagctaaaacggtggggcgtcatcgtggaagtcatcgcctgcatacgcataggctttagaggctttatcgttgttacggacctttgccggtcgccgctgtggcgtgatgccgctggaaccttcattacggctgccaagcatgtgcatttggtcagcaataatctcagtgacataacgctcctgcccatcattgccggtgaacttgtcgtagcgaatggcaccctctatgtagcactgcgatcccttatgcagatattcggcagcgatctcgcccagttttccgaaaaacttgacgcggtgccattcggtccgctcctgggtatcgccctccctgtccttgcgtttgctgctggttgctaggctaatgctggtgatcgtcatgccgctttgggtgtatttgatatccggctcgttccccaggttgccgacaaggatcaccttgttaattccgcgtgccattgtgagtgctcctagagggcagtggatggggagggggcaggtagatgctgttattgctgatgtcgttcattagagatgcctgcttgcattgcccatgaccttttgggcggcctgctccaggtgggggccgagggctttttctattgggccaacgccaccatgcaggccatcaagcaaacgatcataaagttcaccactgatctgcttagctccaagccatgccagtgcttgcggaaccttattgacgtgggacatctcgtgcagcttcttgaagtggaagcacagaaaccagatggcgtagagcacattctcattcaccagcgttcccgtggcggaatagctccccgtcttgcggattgagggaaggacttccaacacatccagcacccaacggcgaaacgcggcggcaactgaagtgcgggcgaacatcgctaccaggtggcagccgcgagggctgaagagtcggacaggtttttcagagttgccgcaaccgaaacccttgacggtcaaattgaccgtcaagctcatttcactggtgaactcgtcggtatggcgcgagtagatacgcaagacagcactggcgtccttgtagcccaaagctcgggccagatcggcagccgtcaggtaaggaatgccatcatgatcaatgatggttagggatacgtcggaaaaatcaacggacgcaggaagggtgttatgcatggtgcaggtctcctttcgagagggaaacccatcaccagacgtcgctaaaccccatggtgatgggacaggcaggattagcgaaccgggaaaggagcttgcgcataaaccggcagaccttgcggtcttcctgactgccccaccataaactgtaggaggcaacaaaaaagcgccactcgggatgtggggcgctgttgaagcgcctttcatcgggccgctaaacccggcgctagaatttgccagcgcagtagcgacggtaccgcagcggtgaatgtgggtcaagctcaggccgcatctggggtaaaatgggccgttcatgtggcctgccttgcgatttcatctttgatggtcattccgtcatcaatacagacaccctcattgatgcggacatgttggccaatattgactgcgttgccgatggagacgtgatctccgataaaggctccattgctgatgatagatgtctcaccgatagtgacacgcctgccaatgtgagcctctttggagatgcaaacacgttcgccgatgatggaactatggcagatacgtactttcattccgatttcggcacgatgcccaatacgcacattgtggtgaatggacacaagtgtgccgatagaaacggcctctttgatcctgacgttttcgaagatgagtgatccttcaccgacacgtgcgttattcccaatacgggtattgggggcgataaagacatttttttgaatctgagttttttcccctatcaacgcttcctcttcgataatggcatcaggaaataccgcggcgtttttttcgatcaccgccgacggttctatgagcgcgttaacggaaacaatgccgcctttgctcccatcaggatttgtccaatagcgtgcacgggtggttaattcgtctgtaaatgtgtaatcgaaatcgccactcatgggatggctcatgttgaggcgttttttatattccagaaaagtgtcttttctcatttcacgcatggcctgactcaagtgagtgagcactgttttgaagcggtgttcgaacgattcttgttgcgtgcccatctgtgttttctcgaaggtgtcactcatggcgtgcctcgtgatattggctgcccctgtcatcacgcggcctgctggatggcggtgcgggatgcagcgtcggacaacacctgtttcaaggtatgacagatcacaggaaattcagcagcggcgtaccacttggtggcgcgttcggtgttaacaggaacaaaccccagtgccgctaatccatcggcattgatggataacggggcaatcagtgcgttgatctctcccagcttgagtgtggtgtgtatggatgcaggtgtgggagccgtggttacactggattcggtggagcagttgactgttggcgaggtgggtaatggcgttgcttcgacggtgttctggcgctcgcgttcggcttggatgcgtgcctgttcctgctgctggtgatgggcaatgcgggcaaggatcaggttgcgcaggtcatcgggtgttttgctaatgcataagctcaccctatctgggaacagggagaggtaagccgtaccacattcttccagcacggtgatattggtgcgtacccgttccacgtgggcagtgatgttgctcttctcgtgggctacggcggtgctcacagcctcctgcatgctgatcatcgacttcttgcctttaatggtgtcaccgatctttgcaggcaaatcagccggaatcggcagggcgtactcgcctaatgtggcgttactgctggcgtagtagtcacgcagggtattcaggccgctgtggacaatctcagtacggcggtgcgctttctcggtgttcaccaggcgatccaattccaggcgaacacggcgggtttcttcggcgatctcgtccagggtacggaacacggcatcgatgtcggcggtttgtcctaatacctgttgtttggtggcgtctaggcgcgtttcgacgcctttgcaccatttcacggtttgttctgcgttggcaaaatcctcatcggtgtgcaggtcacgcttgatgctgtgcaatacggccagtgcgcaggctttgaagtgcggcaggttggaggtggtcaccgttcctgtgactgcaatatgcaatgccggtagttgctctggtgaacggcccaaggccgcaggcggtggcggtggctcaggctggtaggcggcgatgtcggcttgcagttggtgccatccgttgataatgcggttacgtaattcgggggttggcgtgtaccagcaatgacgttcttctatgagctgttccccgttccaggccgaggccatgaacaggacacgttgggcaccggacaccatgctctggtgttccatctgtagttgataatggaatggcaggtcttggccggtgctgccgtctgtcatggcggcgcgaatcgtgtcattgagttgcttgtgttcccacacggtgtcttccagcaaggtcaagccgtcgaagctggccgaatacatgccatcgacacccacacagggatacaggtcatcaccgatgatgcgttctgccaaggggcgtgccagttcctcagcgcgatgtccctctgcaaagcgttgtaacgtggcttggtcatagtcgggggtgatccccgtggcgcgttcccgtatcagttcggcacggcttttataggggctgcatcccatcatggccggtgcgtcgctggcattgagatgctgggcgcggtgggtgtgccattgcggggtgccttgggtcagttcaatgatcttcatgtgttttcttccgtgtgagtggtgttgctttcctgtggggtgttgtctgtaggcacaggctcagcactggtgtcttcggcgcaggcgcgaatggcggtgagttgctctggggttaattggcctttgtctttgctacgcagcatcgtgatgatgcgatctgccgtggtttttcctgattcaatcaggtcacaccattttggaaaattcttttcaaattcttcgtgtgggtaagggccgctgatgtctctgacgtcttggttaacggggatgggggcaacatggatcgtttcgccctcaatcgtgtgtcgtccggcatccatttcttcagccgtcggttgagcgcccacggcttctgggaatgctttgcgaagtgccaaagcttcagcgcatttctccaactgtccgaaggggcgtttttgccacatgctgttaggggcggggctgtcttttcttgcggtggcataggcttccagccaatacacggttgcggcgaaccgaacacgttgaccggccaccatgcggtacaccgcaacgcggcaccatgacggatagcggatctgcacgccgcccagtgtttcgcagagggtgtctccaaacacggcttcatcttgtccggcgtattcgccggtgcggtgtgccttggttcgatacagttcgatcccgggcatgatcacatcgcgcatgcctgccgatgacacaacgcgcccatcgactttcttttctggaatccacatcggcacgatgtgaacgggttttgtcatcgggtctaaatcagccgcctggcaataggacaacaccatatcgacagaggtatctgaagcccccggataaagactggttttcaatgcggtacggatcgattgctgatattcggctgtcattggtatgacattgtttggtttgatgacagacagggagttcatggcagcttcgctctgttaaagggatggggagaatgtgccaatggtcagcgtggcgtgcccttcaagctcacgaaacaacacgcttttaaaatcctgggcgatcatttcctgctgtgcttcacgctgtatgaggcgcagtgtgatgagtggcttttctttttcttcgtcggtgaatacggacagccgtagcaggaatctgcgttccggtaatccaagatagggcttggtcgttaaggtgaaaccaatcggtaagccaagagatgatttggcttggatatcatcgaacttggaacgtgatgtattgaactcgccttgagtcgattctgactctgaggttttcttgatagttaatttgcgaatggcattaatcgcagtcgccagtggtagttcatcaaggctttcttgtgatgtggccgacagcagcggtgcccaatcttccaggaaatcaatcaacttccgctgattgagtgttttaccgtcaatatccagcagtgctttgtaagctgctgtggggttaagtgtgagcgtggctgtccagtcgccatgaccgggtgattctgttgtaccgagattgaaaaatatcttggcactgagattttctgcattaataaagccttcgccatttcctttcgtcttgatgtactgcacgaagtcgacgatggattgcgtttgcattgctccacgaaagcgggagcgcaactggaagagagattcaagatctttgattccataatcaagaggaagcgctaccgctctatcttgtaatgcagcaggcaaacggaagccattggcatcaatggcggtttgttgaatatgttctatcgctgttttgtccattatttaattcctttttttagttaacaaatgtttgttgagtgagtcatcattggttttctttcggaaaacaattgctgttgtgtatcggggatgagcgttaatttgccgcgtgccccgacatacattggcgtgctcgtggtgtcttcctctatgactttgccgcgttccttgggttcaacgtatttcaaggtgtgatcgatcatgacttgcgaggattcgccaatgggcttgatttttaagatgagcaccacctcaccttgtttgcgggtgtagctgatggccaacgccacatcactcagcgcttttgcaaatttttgggcgagcactccgccatctgcgacttcaaataggtgttcgaggtctgttaacgatgttctttctgtagtgatagacatggtgtcctccagcagtggggttagtgcttgatcagggttgcagaaagcgttttagcggcgtcgtagtgcgcgcgacgaacgcggtaattggcgatgcgtagtgcgttgggcgttgctcgggtatcgcgcgaaatgcagtgggctaatccagggtgcgcgtagtaattgcaacgtgcagcgtgttgttctttcggcgtgcgatagcggttcatgggtgggtttctcctgtgtcagatcacgccgcacgtggcggggtgggctgcgtgttgtttcgcattgatttgcggtgaatggctgtgacggcaataacggctgggaatccgaagcgccggtaggcgtcagacttggcctcaaccgttttctgaaacaggccggtgtacgtgtacacaccctgcttggtgcgtgcggtgatggtgcaaggaatcatgcgtattcctcctgcatggcaccgccgcgcatcgcgtgaaagcattccgcttcttggcgcatgtcttcgttgacgtcttcctcagcgagaagatgcaattgctccagccgtgcgagtccttgcacttcggctaatgcgtaaagacgttttaatacatcgctgccgattaactgatgcgcaggcatgtcatgtaaatccgctaaagcaatttccatctctttgtaatgggccgcagacaatgtaccggccacccattcatcggcttcttcgattttttctggatcgctcaaatagtcttgaacgcgagaattaacccgctcggcgaaatactcttggacatcgtcttccggtggttgcagacggggatcgttgcagctgctgtatccaatgccagccattacgcaccttcctttggcgtagcggctgtaaattggtgtggtgcgcaggcagccccctctttgctaacggcctcgttccatttttttgcagcttcaaatatggaatcgctgtgagcttcctgcgcttcataagccgccttcacctgcagatatagcgggtgcgctggcgctacgtttatacggcgctttgtatctaagatcctgcgatcaaacccttttatgttgctgtgcggaccatcctcaaaccatgagcgaacgagcgggctaaaatcgtcgaggtggaacgcaaagatggttactacataacggccctgagggtccgggaaggtgtgatcgtaagactcgctatagacaacttcctgtagctccgaatcttcttcgtcccgaataccctcccgacaaaacagcggcgcttttttagtcccatcggcctgtacttcttcggtcaaggtgctcatgcggccacccccatgctttcagcggcagcttcagcggcttcgtatgtagctaaagcagcacgagcaacagcaaaagcagcatcacgcgcttcttcgtctttagcggcgtcgtacgcagcacacgcttcttttttagcggcttcgagcgcagcacgagcagcagcaacctttatctgtgggtacagcgaatggaagggatgcacgtggatgaggcgatccctcgaataccctttcactacgtagccgctatcaaggggcttaaagcagtcacgcaccagtgggctgaaacctgcttcactgagggcatggataaagatccctttttctgagttcactattaacggtgcttccgtatagaaaacaggttgcagctcttcgccctttgcgtctttgatgccgttctggaagaacagcggtgcttgttcgatcacgcgggcggcttcggcggctttgtagcgtgctttcgcccagatgcttttatcgatcacgcaatctgacccgttagggttgtattccactgggccgtaggtatctgatgccattttcgtatctcctggcccctgccgccgggtgcgggtgtcgtggggcgatggagataaattacctataggtatatttaatgtcaatacccataggtaaaaatatttgccgttagaaaaggttctgtctgatttggtggcataacgacaggtaatgatgctccgtcagtagaatcagcatgtagatggccaagaggatgtagagatcaagtgaaacttgcattgtcttgagatctcccatgatgcaaatggcattactcttgggtaagttctgcatcaagaaaaaatagaattgtttagctgatcgattacactcaaagggttgatatttcttggattttgcgcgaattaaaatggcgttctatgatgcagatacattgaaggggtaaaaatcatgctgacagatcatgagaaagctgaacgccgtgctgtggtgcaaagcgcactcgcaagccaacgcattgaggggttagagccggatgcgcaggccgtggttgatgctgaatgctgggcgcgtggtgaaatgactatcgctaccgccgtggaccagtacaaagcgcgtgttcggctccagatggcatgaaatacgcaggggatcgtggtgatccttacctggacagcgaaacaggtgttcttcgtaatctccttggaatcagcgatcaggggtggctcgataaaatagagtccaccctttcttttttgcgaaccagcgaattgcgtgagcgacccgtaaaaggcaaatttgatctagcgcatttacaggaaatccataatcgccttttccaggatgtgtacgactgggcgggtcaaatccgtcaagttgaaatctcgaaaggcaacacgatgtttgcccagcagattgcgattcagagtgcggcgcagcagatctttgggcagcttgctaaagagcgatttttgtgtggccttgatgctgaggaattcagcaaacgggcaggtgattatcttggtgaaattaatgtgcttcacccattccgcgagggaaatggcaggacgcaacgggaattcatcgcgcaattggctcagcgtgcaggttaccggatcgactggggcgtggtcagccaggcggatatgattaaagcgtcaatcgacgcttacaacggggattcaagcggattggctagtatcattcgcgaaggaatatctgatcagctttttaaagataatgagtaatccacgaatactggaaacaattcatctctttgaagaactggcaagggacatcaagaaactctttctaagtgctgaatgagataaacgcgcccaccaataattgtattttcatcggcaacgaagtcaggataaagagctttatccatgctggtaacgtaaatgtatccgtttctctcatgtaacgctttgatttgctgaccgctacctgtatttatcaggtaaagcccatccccaacaaacgtattgcaaccagtatcaacgagcaccgtttcacctgggagaatctttggcgacattgaatccccagttccggtaatcagcttgagcctgcctggtgggggtacgaatccaatgagtgagcgaatgtaatttggtgtgaattcaacagagtttacaacttcaggaaaatcctcattgatacgacctggtcccatatgcgcctctgcttcaatatgctgaacgcgaacatagttagtagcttcccgattatctaatacccttgacatagtagcaatttctttaaatgcatctggatacgctctaaccagaagctcaagcatgtcttcaccgattcgcttgcgaccagctttctttggcggataaagcatccgcgacacgtaactggaatctttacctatcttggcggcaatcatcgctttaccgccatagccaagcttgtcagatagagctttaagcgctaatcggcgcatttcgtatttatccatgttgctattcgacaatttcattacctttaagtaaattgcctatgggtattgaaataggtaattaccctagggtatattcatgccatggaaaccctgcgtacctacctcgcgacactcaccccaaccgaacaggcgcactacgctcgtaaagcgaataccaccattggttacctgcgaaaggctctctgcaagggacagcgatttgatggtgcactggcgcgccgacttgatgaagccagtggtggccgtgtttctcgttacgatcttcgcccagacgtatttggcgcttcccccacaggccacaggcaggaggtgtccgatgcggcctaagaaacccagtttttccagtcttttgcgcggtccaaaggcagtacgtctttggtggtttcgagcacgcaaacaactgcactgtgtggaatgtgcaaaacgattgtatggggtcgagcttctccagggcggggtttgttttctagaactactgaaaggtagtggctttccatgtccacacaagtcaaaacccaatacggatggttgccaaaatcgccatctgaggggcgatatttcgagatgacaaatttcgctatgactgaatctttttccagtattaacgcgaatattttttcttggctcatgccgatctccggtagtgatttggttgcttggaaacaccaattctaccggcaggttggctccaacccgattccgattggttttgcacttatggaggtttctgatgctgcgtgatggtttggaacggacacgtgctcgtgtacccgtttccatggatgaactccgcgtcaaggaatacgaggctaaagccgaactgctgcggttggaagcagcagcaatagacgatctatggcttaaagagcgtcttttggcgcagtccagccttgcatctcttggcgcaaagcaaattgcaaatctttgtaactcattcaaacggtgtgccgtttgatgcgctgtcttcgatcttttcaatgacattgaataacccttggtaatgaatccatgtatgccgatccaacccacattcgtagccacccagtgaaggtgcgttttaacgatgccgagcgcaaattgatctttgcgttggctcaatacaacgggatgcaaccggcggcgttggttcgtgaactggcgttatcggtagccactgctgcgataaagaatgataagcggcaagcagacgcggcttgaagtggctaaccaggccccttggaggccctgtgaagattgatctaacaccagctgttcaaaaaatatttgagcaatacgcacaaatctatggactggcttgtgttgatgacgcagtagaacacgctgcaaaacaagcactaaaggacgcttatttgctacgacataagaatgagtattcgcctcttggagaaggcagggtgatccatttgaagggacttaaaaggcccttaaggaatcaagaatgaaagcaagcgatgacagcggggccgtggacacggtgcactctggcaacggtgatgccatgagcaccgctgttcgctttttctttgatatttcagggatacaagagcagctaaggcagcttgcgacccttttggaaaacattcctgttgattccagaaagcgtgcttttgaattggcttttggctttctcgatcagcttttctctgatgtcgctatcggtgctgaccatctcactcagcctgattctgatctcgtctttagtcagcacgtgagcacacccggaacagatggcaccgtccatgttacttacagcgtgctgttcggcgctgaatttgaacgttttttctccgcactgcggacagctaaattggatagtttttaatgtcatgagcgctccttctttaaagattggttgtgtgagaactccattatctcaaagttgcgagcgctcttttttttgagaaaacgcatgaggacaaaaaagaaaaccatcggcccgcacatggagcaggccgcccaaaagggcatgggcaatacaagcaggcatctctaatgaacaccatcagcaatgcactgggagttgaaatgaacgcaatcacaccgtttcactttgaatcgcaagctgtgcgaaccgtggtcgatgatcacggcgaagtgtggtttgtcggcaaggatgttgccgatgtactcggctacgccaatcataacgacgctttgggcgcccactgcaaaggggtagcaaaacgctacccacttccagatagccttggccgcttgcagtacttccggatcatctccgagcctgacatgttccgcttgattgcgggcagcaaacttcctgccgcagaacggttcgagcgttgggtgtttgagggagtgctgcccaccatccacaagacaggcaaccgttccgcgcttgaccactccactcattccgccaacgcaatcactccatttcaattcgaatcaaaagatgtgcgtattcagctcgacgaggctaatgcgccttggtttaacgccaatgatgtgtgtgccgttctggagttcggcaatgcgcatcaagccattgaatcccacgtagatgtagatgacctccagaagttggaggtcatcgacaccctagggcgcacccaacgcgctaatcacatcaacgaatccggtttgtatgccttgatcatgggcagtacaaaacctgcggccaagcgttttaaacgatgggtcaccagtgaagtgctgcccaccctgcgcaaaacaggcacctactccacaccaggagcactgcccaccttgcctgggccgacacaggatcgcgttgccgcactcctgttaatcggccaattcgtttccaaagtgactggcgtaaaaccaggaattgccgcagcggcaacgctggcctgtatcaaaagcaatacgaatttaacaacggaagagatacgccgcgcattgcctgcgttgcaggaaccgctttgcctgctcaacgccacgcaactaggtaagcggctgcattgctcggccaaggcggtgaaccaattattagcctcggcaggctttcagttccgtaatgaacgcgacgaatgggaattaaccgaagccggtcgcgtgtggtgtgaagccattccgtactcacgcaacgggcacagcagttatcaactcttgtggaatccagacgtcatcgcgtgtctgagggaggcggcatgaattactacagacgtaatattgatgagtatatgcgtgagactaaacatctctcgccgctggaacacggcatttatttcctgctattagatcattactacactacagaaaaaccgattccggctgataaagcgtaccgtttcgcttgtgcccgtaccaaaaaagaaaagaacgctgctgatttaatacttaatacatttttctcattgcaagaagacggctggcataacaagcgatgcgatgaagacattgccgcccataaagaaggcaatggaaacatcaccgcagaggggaaaagtctgccatgaattattacatgcaccaccttggcgattacaagagtcacactagctatctctcgctgcaagaacacggcatctacttcctgctattaagtcactactacattacagaaaaaccgataccggctgataaaacgtacacgtaccgtattgcttgtgcccgtaccaaaaaagagaaaagcgcggttgatttcgtgcttgatacatttttctcattgcaagaggacggctggcataacaagcgatgtgatgaagagattgccgcctataaagaaggcgatgcgtggcatgagcataaagaggcgaataagaacggtcagaacactcggacgcgtcgccaccgtaaagaacgctcacgcttgtttgccgaactgaaagagcatcaggtcactccagattggaatatgcctatcaaggaattacggctgttgcacaaaaaaacctgtcacgcacctgtaacggctgtaacgccacctgtaacacctgtaacacctactcaagaagaatcattcaccactccctcttccgcattacgttcggaagagagtttgatcagcgccgaaaatgagacatctattaaagaattacggcaattaaacgcaaaaacgaacgcaaaaacctgtcacgcacctgtaacggctgtaacggctaaaccattaaccattaatccattaaccattatctcttcctcactgtgttcggaagagagtttggtattcgccgaggatggcaacgtcaccagctgcacgggaaaacccaagcgctcgcctcacggctcacgcctgcccgatgactgggcacccagtgagggtgatgtgttgtacgccacccagcagggtgtggatggacgctacgaagcggagaaattccgcgattactggcgcagcgtggccggagccaaggggcgcaaacaggattgggaggccacctggcgtaactggattcgccgcgctgccgaagacaaaaccagctccatgaagcacggatatcaacgccatgaatacaattcaaaacctatgcgactgtctcccgcagaacgatcccacgtcttccatagaccctttgatctgcgtgacggagtgctccagtaacaccgcctgccttgcgcaagccacggtgatcccgttcccctggctgcgccgcttgtgggaacgcatgattgccctgtatggcaatacctgggtgagcgctcatggggagtcggcacagagagaagatggcacgctgaccgtggacggtgaaacctggcagaaggtgctggttgggctggaggcgtctcagtttgcggacgggttggcggcgtgcattactgaaggcggcgagtttccgcccagtgcgccacggttccgtagcatgtgtttaggcgtgccatccctggcggcggtacggagtcacttcaccgcaggcagcacgcggggcaatacgccgtttgtagccaaatgctgggagttcatcgacccatggagctattgccagtccagccgtgctgaatcggatcggatgctccgtgaggcctacgagcaagcgcgagactttgtgatgcgtggcggcgtcctgccagcggtgcccgtcgccctgattgaggcgcaacagcccgcagcgtcccaaccggcctcccctgaggtggctcaagcagcgctggaggaaattagcagcatgtttcatcaccctgagctggccgcccgtgaggagaagctcatggctgagttccacctcagccggaatcaggcgcatgagctgattgaatcgggggtgctatgagcaaggcgatgcctattgctgcctgcggcatggcagcagtgaagcagatgcaatctttaacattgccgtggccctccaaggacctgtcaccgaacgcacgggtgcattggacacggcgcagcaaagccgtaaaacaggccagaggctacgccgagatcatggcacgacgtgccggatggggtggcctgtcactccctgttgaggggcgcctggatctatggattagcttctatccgcccacacgccgcttgcctgatgacgacaacatgctggcgcggtttaagccttaccgggatggcattgccgatgccctgggcattgatgaccggcgttttgtatcgcatccgttggttgaggatgacaggcgcacgggtggagaagtggtggtcaggatcaccggcattgaatgaacatgacaggagattggccatgatgaatccgcgtcgtttactggctcgtctgaacccgagcacgatccgctacgacacgctgcctggtggagtgcctgagttgacggcgcaagacattgcccatgccttggggctggtgcctgcgggcttggggcgtgaagtgctggaggcgtgctggtggccggatggcgcagcgttgcggcgtggccccttgcgcgatgcggcggtggcgttggtagtgccggagattcgacggcagcagcagtgtttgctggaagcgcgtacagacgtgggcatagccaaggcgtgcatgggctggagcggtcaggtgacgggtgcacagcgggcggcgcgggatcgtgcggtagcacggcttgagggagtcaaagcccgcctgtggccgcaggcgacgctggagatgttaccggcactggttgcggcggttgttgatgagctgtccaagccgcacccgtgcccctgctgtcatggtcggggggaacgtcgtgtaggggcgttggtgaaggtgtgcacggcgtgcggggggagtggtgcggttcccgccagtgatcgcaagcgcgccgctgccattggccgggacgaatccacctaccgcacgacatggcgcggcctgtatgagtggctgttggagcggatgggtgttgcggaacgacaggcggcgacgcagttgcaagaggcgttgcacagaaatgtggcgtgatgtgctcgttgacctctcgcattaggtaccatattctagtaccatagaatctatgaagcgtaagcacgctaaaactctcagcgctatatacacacgccctgtttcggccaacattcaatggcgcgatattgaagcgctgttcgtggagcttggagcgaaagtagaagaacgtgaaggttctcgtatattggtgaggctgttcggtgaacgtcggatattccaccggccccacccttcgcctaacactgacaagggtgctgttgaatcaatccgagcttggttgaaatcgaacggagttacaccatgaagaacatcatgactattgagagctttaaagccatcattacctatgatccggaaatcgacatgtttcgcggtgaatttgtgggtatcaatggtggtgctgatttctatgcaaaagaccttaagggtcttcgtcgagaaggagctatttctctgaaggtatttttggaagcctgcaaagaagatagcgtggaaccacgtaaatgctactcagggaagttcaatgcaaggatttctcctgaactgcatgctttggcttctgaagccgcagcagcacagggcatcagtttgaaccaatttgtagaacaagcgattcagcatgaagtccacacctgataaaagaaattctccttcattattttgtacatgtaagccgttctagaaataagtcgttccatacccatgtgatgcgttttattggactggagcgtagtgcgggattgatgcccccgcacttttccccctaatctacgcgcctgagtggtgcgatgccctcatcgaatgatttactcgcgccctgcccacctcagcagggcttttttttattcaaaaccagcgaccgccttcgggcggttttttgcgttctggagtccccccatgcagaccattggtgaagaaggcattgcactgatcaaattttttgagggttgcaagttgaacccgtacacctgtcctggtggagtgttgacgattggctacggcgagacgggcaagcacgttgtgcctgatatgtgtcttgccaatgagcaggaagccgatgcgatgttacgtgcacgcttagccaaagagtttgaaccggcggtgcggcgttatgtgcgtgtgccactgaagcaacagcagtttgatgcgttggtgtcgttgagcttcaacattggtacgggggcgtttcatcgctcgaccttgctaaagcggctcaatgccggtgatgtggctggtgcggcggagcagtttggggcgtggaagttttcaagcggtcgtgtgcttcccggcttagttcggcgtcgaaaagccgaacgttggttatttgaaggtcaagattggcaggccgcattagcagccgaacatgcggcggtgaagaaggcatcacgtgattgatattgcggcgcttcctgcctggtggaaggaggcgttttatgtgggcctggcgatggccacggggacgctgagttacgtcatgcgtgcactggacgctaagcagaggctggcggtgtcccgcgtgttgattgaggcggggattgcggggtttgtcggcttattcgtgatgtgtgtgtgtgaatggttggagatgagccaagcgttcacggtggcggcggtgattgcctccggtttaattgatacaccgcagacgttagagctgattcagaacgtgattgtgcccaagctcggcacggggagaaggaatacagatgatcgttaatacactgcgtcgtgtggggcgacgtttgcccagtgtgcggctgttggttgagtacatgatgattggtgcgttggtggcgctggtggcacatgcggtgctggcctggtccgagcgcagtcaattagcgcagcgggcggcgcagctggaaggccagttagcggcggtggaaagcacgttggatgcgcaagttgcgatgaatcgcgatcaagatgcggcgattgcgcggctacgtgcgttacgtgagatcgacaggcaggcgattgcggggctgcatacggatttaaatcggatcacggtgcgcgaccgtgtgttgcggcagcgcatcacgcatctggagcactttcatgatgaggcgaaagcttttttggatagggatgtgcctgacgtgcttgggtgcttgctcgacagggacggctgtcaagccggtcacggtgaggcagacccgcgttgaggtgatcctcccgccgcagggggtgttgcagccgtgtgaggccccggaattagggcgtgtggacacggtgcgtgacttactgaatcagacgttgggatggcgttttgcctatgagcagtgtgcggcgcaagtgcgctgtgttgcggcatgggcacaggcggccagcgtcgggcagccgtggtccgcagatggctgtggtgaagaggccgaatgaggcgggtgtttcctcaatttttttcgccccctatatatagagaaacgaaaaaaattcaccggatattttgttttccagggaggccgtgcgatggctgagagaggacgtaaagcgcatctaccgacagatgaaaatcgcgtgatggtagaaaagctggcgtcgtttggcacgcctcatgatcacattgccttgttgatgcagatcagtgcgccgacgttgcgcaagcactatcgtcgcgagctggacattggtggtattcaagccaatgccaaggtggccgaaagtctgttcaatatggcgacccacccgacgaggccgaacgcgcatgcggcccttggctggatgaatgcgcgggctggctggaaagacacgcaacgcgttgaggtgtccggtcgcgatggggaggcgattgaacaaaaggttggattggcgttagtcgatgaaaagcaaatcgccgccatcgtgcagcgccttgaatcggagtactgagcaggcgcaagaacaggcggtgatcaaggcccggtgcgaagcagatcatttatttttcacacggtattttttcaaacagcgtcagcaactgcggtttagggtgaattggcaccatcatgtgattgctggggtggtggacgatgtgattgcagggcggcggaaggatgtggtgattaacgtgcctcctgggtcgtcgaaaacggagcttgtggcgattaatgtgatggcgcgagggttggcgctgaatccgtatgcgcggtttttgcatattagttattcggatgatttggcgctgctgaattcggagacggcgcgggagattgtgcagtccgatgaatatcgtgcgttgtggccgttggagattgctgacgatgccaagtcaaagaagcgttggaatgtggtggtggatggcaagaaagccggtggggtgtacgcggtgagtctgggcggacaggtgacggggtttcgggccggacacatggccccgggatggcagggggcgatcattattgatgacccgctgaaggtagaagatgcctacagcaagaccggacgcagtaaggccaaccgtaagctggtgtccacggtgaagagtcgtaaagccagtccggacacacccatcattgtgatcatgcaacggttggcgcaggacgatccgacggggttcatccagtctgggggatttccgggcgcgtgggagtgtattgagattcctgcattgattgatgatgcctacgtgtcccgtttgccggagcacgtgcaagggcaggtggtgcgtgatgcacaggaccaggatggacgctacagctactggccgtacaaagaaccgttagccgagttgctggcgttggaagccacggatcgttatgtgttcagcggtcaatatcagcagcggcccagtccgctgggcggtgggatcatcaagggtgattaatttgggcgctatacggtgctgccgcgccttctttcgcgcacggtgtatggcgatacggcgcagaagacggctgagcgcaatgattacagcgtgttccagttgtggggcttgggagaggacaagcgtatttatttgttggacatgattcgcggcaagtgggaagcgccggaactcaagcggcgggcgattgatttttggaatgcgcatcgcgcctacgaccataaggtttcagcgccgattcggcagatgaagattgaggacaaatctagcggcacgggcttaattcaggacattgccagaggtggctccggtcaggggcggattccggtgactgggattgcacgggtgaccgacaagctcacgcgggtgatggatgtggtgtcttacattgaggcggggtgggtggtgattccagcgcaggcggggtgggtgaaagattttgtggctgagtgtgaagcgttcaccgccgatggcacgcatgcgcacgatgatcagattgatccgatggtggatgcaatcaatgatttgctggccaatccgtccagtgattggagtcgctgggtgtgagtggccgcaatcgcaacacgcgtgccacgcgctccagaccgggggcggcacctcagcatgtcgtggacaccttgcagaacctggtggccggactgggcgatcagcgcgacaagatgagctatgggcggtacctgctgccccgggtgattgatcgtgtggaactggaggcgatgtaccggaccaattggctggcgcgcaaggtggtagatattccagcgaccgacatgacgcgggaatgggtcacgttgcagacttgcatgcaggccgatgcgctggagccgatgtatcgattggaacaggcattgaacgtgcgcgccaaggtacgcgatgccttggcctgggcacggttgtacgggggggcggtgctgtttatcaatgtgcatggacaagacccgtctttgccgtttgatccggcctcggtcatgccggggagcaggctatcgctgacggtgttggatcgctggcgggtggcgctgggcagtggtcagatggaccaggaccccttgagtgagacctacgggcaaccgcgctgttatcagattgccggatcggtggagcgggtggatcgttcccgaatgattgccttctctggcgcggaactgccctgggaggcattcagaggcaacggctactggcatgactcggtattgcaggccatgtacaacgcgctcagccgctatgacaccgcgacccagggcacggcgtcgatgttttttgaggcggtggtggatgtgttgcggatctctggactcagcgacactctctcctccgaccaagggacgcaagaggtacataagcgttttcagttagcggccatgatgaaatcgttcaatcggatgctgctgctggatgctaaggatgaatacactcagaaaaccaatcacttttcgggcgtcaaagaggtgattgagcaattcatgatggatatttccggggcggcggatattccggcgacgcggttattcggtcagtcccccaaaggcatgaacgccaccggtgatagtgatattcgcaattattacgaccgcatcaaggcgcagcaggaggacgagctacggcctgtgctgagggtgttgtacgccgtgctgtttcgggcctctgtgggggagtgtccgcaggatttagagattcagttcaattcgctatggcagatgagcgagacagaacgggcgagcattgagaagctgcgtgccgagcgtgatcagatttacctggcgcatggtgtgatcggtccagacgtgccctgtgcggagctgctggaacaaaagacgtactcaaatctcaccgaacgcgatgtgaggctggcggcggaactgtctcaggcgatggagcctccagatgtgttgccagtggtggaaacgacggcacccgcttccaatacataggctgcgattggaatcatgcagtggtcagataaaaaaccggcgaagcactcacgccgctttcagcacgcgcatttccacatgcatgccagccgccgcagccatgttgaccagtgcatccaagccgaacaggttgattttgccgcgcattaaatctgacacgcgaggctgcgtgacaccgaacagcgtagcggcttgagactgactcagcgcagccgtttcgatgtgttgtttcagggccatcatgagtgcggaacgtaacttcatgttttcggcggcttcgggagtgtcctcaatggcatcccacacacttgtgaatcgctcgttgctcattgtcctacctcattaaacagatcacggtagcgtttagccgctacatcaagatcgcctttggtggttttctcagttttcttttggaagcaatgcaacacatagacagcctcggacaacttggcaacgtagataacgcggaaagcgccgtctgcgtcacggatacgaatctcgcggactccacgccctaccgtgggcatgggcttccagtcgtcagggtcgcgtccgttttgcacttggtgaagctggtacccggcctcacgtcttacgctcactgggaaagcgcgtaagtcgtcaagagcgctgcctctgaattcaatcggtttgggtcctaccatgcgccatcatacaaaactttgtatgagcgcaaggacatctttgtcggcccgcggaatttaggttcactgaggatgttgacattaccggacctactgcgcttgcagggacgccggatcaagcagcggcagttacgcccgccgcgccccagccgccacgctgaggctacgtacaggaatgaactgctggccttggtgcgggtgctgcaccaggcggtgcgggaggaggtgctgccggtgctccacgcatcgccgccccacataacacgtgatgcgcctgacggcagcgccccacagggctatctggcctcccagttcatgcaggccatggaagcggccttgcggcgggcggcgttgcgctgtggtggcttgcctcaatgggccgagcggatggccgcccagcaggtgcaacgtgtggatcgtcaggtggtacagacgattgggagtacggtgcggtgcgccttcgggatcgacatcacgtcattgatgctggcccaggaggtgcgcacgcagatacacgcggcccgtgctgtcaatgtccagttgatcacctccattcagcgacagtatttcgacaagatcggtaccgctgtgttgcaaggcgtcatgcagggcacacgcgccagcgcactggccaaggagatggaacagatcaccgatgccacggcatcacgggcgaagtttattgcacgggatcagacatcaaaaatgaatgcggcgttgaatgaaatccggcaagtggggttgggcattacgacctacacctggcagaccagcggggatgaacgggtccgtgaggatcatgccgcccatgatgggaacgtgttccgctggagcgatccccccgcgacggggcatccgggacaggactacaactgccgctgtgtggcgattccgaatgtgacgctggaaggcccttgatgatcaccctagatgtccaactgacccagcgtcgcaagacgccggaagggtatctgatcgtgcctgcccgatttgcgcgcatcggcatccagcactatgccgcccacgaattagggttgagcgatgcggatccccagcgggtgattcgcgtgtaccgcccccctgaagaagtgtttgctgccgaggccatcgccagctttgatggtcgcccgattaccgatgagcatccggatgaggaggtgaccgccgagaactggcgcgcccatgcggtgggctttgcccgcaatccacggcgcgaaggggagtatctggtggccgatctcaccattaccgatggggcgacgatcgaaaagattgaggctggacaacaagaactctccggcggctacagcgccgagtacgactggaccccgggctggaccccggagggcgaagcgtatgaggtgaaacagattcggattcgtggcaaccacattgccaccgttgccgcaggccgtgctggaccccagtgccgcgtggccgatggcgacatggccttacccccaccctttggagaacaccccatgaccaaacgccgcatcagtgtcgacggtatcagcctggagcttgaagagacggaggccagcgccgtcgaacacctggcggccaagctcaagacggccaccgagaaagtggatgccctggaagaggatctgcacgccgcccaggcccccatcaaactggacagcggccaagcgctgaccaaggaacagctggtggccaagattgcggagctgtccaagcaattggcggcgctggaagcggcccgcgctgcggacgaagacccgcaacagcgggatcaagcgattgaagccatgtcacggcagatgggcgatgcgcggcggctggtgccgggcctgatcaccgatggcaagccgtgcagcgcgatccgccgtgacgtggtgagccgtctataccccacgcatacggccatgattgacaccttactgcacggggtccgggtggccgatgccgcccagacggcggtggacctggcgtttcacgttctggcgtctgcgccggtgacggcctcggcagggctggctgctgaggcggtgaatgacgcgttacggcgtcaggtcgtcaagacatcggatgccgacttggacccgcgagcggcgtatatccaacagctcacccataccacctagagcacttcagcacccgaaggaacacgtatgtccggaattgatttatccacctatggtgggcgcttacttgatcttggcgttgcggggcaagtcatcgacttgaacaccagcggcctttacaactacaaaaacgccggagaaaccccgattgattttgggttatttgtggcacgcggccccaaagacaacacctgctgccttccaggcagcgatgccatcagcatcctgggcgtgagtgtccgccacgtcacgatggtcgccgatgaggccggacaggtccgctatgccccccatgcgatggtgccggtgttggagatcggtcgcatctgggtgatctgcgaggatggctgccgcccggatgatccggtgttgatccgcattgcaggaacgggggccttgggcgcggcccgatccgccgccatcgcttcagaaaccattccttacccacaggcgcgctgggacagcaccaccgcccccggagcgctgggcgtgatccgcattcttaactaagggacctgcatgaacatgattgacatacgccgccgtcagatggccgatgcgttgaccccgatgttgctgaccgatgcgcggtatcagacctctgatgccacccaagcgctggcgtttttggtgtcgcaactgacccatgttgaatcgacgatctacgcccgccagcgccaaggcatccagtaccgggatttggtgcccatcagcaccgaagcgggcgagtacgccacctcggtgacctatcagatgtacgactattccggacgcggcaagcggcattctggacggggcgaagatattccgacggtcgatgtggcctacgcacaaaagagcgtgcctgtcgtgctgggcaccattggctacgattacaccaccgaggaactgcgccaatcggcctttctgcgtaaacccctgaataccgcgcgggccgatgcggcgatggatgcctatgagcgccatatcaacgatgtggcgttgtttggtgaggacgaactcaccggcctgtatacccatcctggcgtgccggtcctgttgaacacggcggggccttggatcggtcagtcgcccgcccaggtgctggccttgttcaatcagctgatctccagcgcttggatgaacacccactacgtggagatgattgataccgtgctgttgcctggtcgcgtcatgaactatcttgtctccaccccgcgcagtgacaacagcgataaaaccattctgcattacgtgttggaaaacaacattgctaaagccgagcgtggccttgatctgaccgtccgcaccggctacggcttagagacggcaggggaaggcggcacgacccgcgccatggtgtatacgaagaaccccaccaagctggtgctgcatctgccgatgccgatccggtttttgcccccgcaacccaagggcctgaggtttgatattccaggggaatacaaatacagcggtgtggagtttcgttatccaaaatcagccctgtatgccgatggcatttgagcctgaggccacacgcacgacactagcgccctccggcgctttttttttggagaacgcagcaccatgaccacgatcatgctcaaaaacacccgcagctgtgatgtcaccctggatggcgtgacgatccaggccggacgcacccaggccctggaggccgcacacgtggagcagctgcggcagcaccctggcattggcctgtggtttgacaatggctatctagtggagcaggaggtggaaccgtcacacgccccagtggggggtggtgaaggggagaaggaccctgcgacagaaacggggcctgccacagaagaggccccgcatgacgctgcaccgggtaaaccaggcaaatccagaaggacctgatcatggccgagtcactgacgattcacacgttcctggcgcgttaccctgagtttgaaccgttgccacaagaccgggtggaacaggtcattgacgatgcacgcctctggctggatgcctcccgatgggggcatttttatccgcaaggcttagccagtctggcagcgcattttctgtggtcgtctcctagtctgggtgccgaccacagcgccggagccagaggcgcggtggtgtccgagcgggccggtgatctacagatcagctacgcagcgctgtcctctggcactcccagtgacgcctggctagccacctcggtgtatggacaacgttacctggcgctgcgtcggatggtcggcctgggggccttggtcgccccatgagtgccgtcacgatccttcggcccgtcgatcccaaaaagtggaaggccctggcgcagcggcttcagacgctgggggagcgcgctgtggtggtgggcattgctgccgcgcagaacgcccggacggaagacgggatcggctcggctggactgttggcggtgcatgaattgggtgcgccagagcggggcattccggagcgctcggtggtgcggcgttccatcagcgcgcatcaagaaaaatatgtggctttgcacacgcaccacgtgcgcgcggtgctgcgtgatgcgatgaccgtagagaccgccctgaacctgctagggacggtggccgccggtgatgtcaaggcgacgattcgccacgcggatcttgccccgctgacgccccaaacgatccagcgcaaagggtccagcgccccgctgatcgataccggccagatgatccaatccattacccatgaggttagggatgcttgatctgcgccctattttccgcaattcaaaattggcccagcgtgtccaggtgctgcgccgtcagggccagtacctgcccgatggcacctggcaacaggagtctgtgttggacacggtgctggcgatcatccatcccaccacccccgatgatctgcaactgcttccggaaggagaacgccaccacccatcgaaaaagatcatgagtcaagatcagatcgatgtgggtgatgtgctgttgtaccaagacacccgctggcgtatcacccagctttccaactggtccgagtatgggtactaccgaggcatcgccgttggacatgacgggactgcgcaacctgctgcggcggcttttgtcactacctgaaggtgctgtccgtccggcggatcagcccgcgcccactggatcggccccttttgtgacggtgaagcgcctgcgttctacccccttgggagccgaatgctgcgcctttgatggccgccagcagagcatcacctgcgcctatctgcaccacatcagtgtgaatgcctacggcacgggcgcttatgaactgctgttgcaggcacaggccttactgagctgcgaggcgggcacggcagggctgcgcgccttacgtgcgggcctggtgtccgtcacggctgtccaagacctctcggccattgtcggcgctggctatgaagcccgcgcccggatcgaattacagatcacccaccaccaccgtgtggtgaccacgctggcggctgtggacagcgcagacatccatattcacacccgcaccggtcacatcgccagcgtgaccatgacggcaccggagacccagtaaatggcgctacctctttcaaacattgtcactgtgcaactcaatgcacagcccctgttggcctcccggcgtgactttgggaggctggccttgttcactcccgaagccggcagcgtgtttgtcgataccaaaacacggttcatggatgccagcacgcagcagcaggtggaacaggcctttggcagttactccaaaaccgcagccgccaccggccgcttctttgcacaaagcccccgccccaaacagctcatggtggcgcgctggaatcgctttaaacaacacattgccgcctccccaacgacactcacctccggaacgattgctcaggcgcagacgtggtacaagggcgtggatgacggctgtttttccatccgcatctatggtgtggatgtcaccttatccaaactgaatttcaccacggccacctccttctcccaggtggcaggtgtgttgaataacgcactggatgagtttggagtgaattgccgatttttaaatggctgctttgaactctatgcggccgtggccggaggaaatcacgccattggctatgcacagcagcgcagtccctctggcacctatgtcgggcactggctgaagcttgaagccgatcaggcccgcctgaccatcggcaacaacgctgacaccatggaggccgagacactgccggaggcctttgcggccttgcaggcactcaccccaggctggtatgccgctgcggtggccgatgagacattgacagacacgcagatccgatccgcctccgcctggatccaggcggcagacaaaaaaatcatgggatggacgacccgcgaggcggcgcatttggactttaaaaaaaccaatgtgttcagacaactcaatgcatcggggcatgaccgtaccgtggtgctgtacgacaccacagacccctacgcggtggtgtcctggctggcgcgtgcgttatcggtgaacttcagcgccaacaacgccgccctgactatgaaatttaaacaacttcccggcgttgcggcagatcaattgacacagacccaggtggcccaatgcgtgcgtttaggcatcaactattacgcctacgttgatgatgtggcgatggtggccgaaggcacctgtcttggcgggcgcttctttgatgaagtccatctgctggattggctggtggatgcggtgcaaaaggaggtgtttgccgtcctgcatcgcagcccgacgaaggtgccactgacggatgcaggcacccacctgctgatcgcggcctgcaaaaaagtctgccaagaaggggtccgtaacggtgccttggcccctggcctctggaacggggaggccttcggtgcgctggccacgggcgattacctggaggctggtttttatgtctgggctgattcagtggacaccttatcgacctccgatcgccaagcgcgccgggcaccgccacttcagatcgccgtgaagctggccggggccatccatgcggtggacgtcctcatcaattttgaccgataaaggaatcccatgtccgtcttcgaccccaaacaagtgtcggtgctgctcaatggaacccagatcaaagactgggccgatggcacggacgtcatcgacgccaaacacaatgctgatgccggtgcctacaccatcggggccagcggcacgggcgtgtttgtcgccaacgccgatcgttccggcaccttaacgttaaaaatcaaacagcacagcgctgacaacacctttctgagcaggcgactggcgcagcaacgcggcgcgatccagtccttcacccccttcaccctggatatccgtgacctgttgaatcaggacgtggtgacagccaccaacgggtatttcacgacgccccccggatttacccggggcgccggacacaatccggaaacctggacactggtgtttgaggtcatggagatcaccctagaaaaaggctttggcaacacatgaacaatgaacatcgttttgaaatagagggcctcacctatgtcatgaccccggccaatgcgatggcggcgtggcaatcgctcaaacgcgccggggtgctgctgcgggggatggatgcggacgccctggctaacgcgcaaggcgccgcctccgtggccctagggacgcttctaagccacctgggcgaccctgcggtcactgagatagaagccctggtgtttgaacagactgcgatcaagacccccgagggcaccacctaccggctcagcccagatcggctcaatgagcacttcaacacccgccgcacccatctgctgcgcgtcttgatggaaggagtcaagtatcaatacagcgattttttcgttggcggcatggcagccttccaggacctgattcccatgccgagcgccgagcaggagtaaccgactggtttgtctgggcaccgatcatgcgcggctattgcgatcttgagcaactgcgcaccgtgtactccctcagtgacctctgtgccttccataccgcgatggtggaatgggatgccctccagcatgacgcgctaaccccctgcgatgattctcgacgaattcctgatccgccttggcgcggtcgctgacacctcagacttcaacaccttcagcacctgcctgacccgcgtcacaggcctcgtgacggtggccgccgccgccatgggcggggcgctggcgggaatgaatcgctttgtcggcagcgccttaagcgaactcaatgccctcaatagcgccagccagcgcaccggagccagcctgtccttcctccaggagctgggctatgcggcgcgtttgaatggctcctctgtggaggcctcgacccgttctattgaatccttgtcccaaaaaataggcgaagccgccaatggggtagggcgcggggcgatggtgttccagaagctgggcttgcaggcccgacaggccaatggctccgtgaaatctgtcggcgacatgctggggcaggtgcaagaaaaaatccgtggcttatccgcaccacaacagcagtccatcctggccaacctgggcatggatgccacgatgttgcaaaccctgcgcctgagtcgtgaggcgttaaacggcctcttccaagaggcacaggatctgggcgtcatcaccgctgctggtgccgataccgcgctggagtatggcgatgcgatggaacgcctgcgcgtggtgatgggggccttacggaccaatatcgcccttggggtcgcaccggccttcacccgcctgattgagcactccaaacactggctgattgccaataaagagcaactgcgtgatggcattggcaaagtcgtcaagaccctcattgcagcgggcaccgccgtatggaactttatccgtgcggtgaacagcgcggtgaatcaaaccattggttggaaagcggcgctgctggccgtgggcgcggtgctggcccgggcctttgcactgaacccggtcacctggctgattgcggggattgtggccctcgtggcgttggtcgatgacttcatgacctatctggacggcggagagtccttgctcggtgccttctggggtccgctgatcacctacgccaagcgtgccaaggcggtgattgaacaccttacgcccgcactcaaagccgttggcgtcctcttggtaggactggccatcggtcaggtggtgagcaacatcggccgcctcctgggtgcaggccgcactctggcgctgtggctggcggggccgttggtgaaaacaatccaggccgccgcgctggcgttgcgtgccgcctttctctccaaccccattggactggtgattgcaagcgtggccctgctggcgtatgcgatctatacccacttcgacaagatcaagcacgcggtggggacggcctggcagtggtgcacccgtaccgccaatgctgcctttgggtccatccaacacacgctgcaagaggctgccgccgccgccaagaccacctgggccagcatcaaggacgcctgtgcgctggcctttagccacagcatcgccaccgctgatcacgcggtgaaccgcttgcgggccgtgttcagcgccatgggcacccgtatcagcgccgccctgagcagcgctttcaacaccctcatgaggctatgggatcgcaccgtcgggcgtatcgcccagggggccgagcggatcaaaggcttgttccgagcgattgctccaaccctgaagcaggctggtcgtgacacccaagatgtggcgcagcgcgtcaatgcacaggtgcaagccgcccagacaacaggtcgccacgccgctgctcaggccgccacgcccgcccgcgcccaggccaacgtccattcacaacaggatgtaaagatcgatatccacaccgccgacccgatcctggccggtcgccaagccgccgccgacatcaacagacaccaccagatggccttgcgtaataccggcagtgcggtggcgttttgaggggattgtttaagaaaacagactaaatagtctgctaaaccagagtgcaacagtcggtacgtggggtagccaacctatccctatagataatggcaagcaggcagatgatctccgaagaggaaagtggttataactattttgaatatgacttaaacattaattaatgtgacatgaatcacatagtggtggtactaataaagctcctccatataaataaatgcgtttagttaatgactgtagcattggaggaaacatgaatcgtgtgattggatatcgcaatcctcgtatacagggatgtttatctaaacagttttaaggagtcattaaagatgagagagttgacctttgaagaagctttaaaagtagatggtcaggggtgggctggggccttcttgactggtgctggaactggtgcgtatgccggtggtcttattgctgaagtaccaggcgctgttgtgggtgcagtggttggtggtgtcataggtgttattgcaaatctattttgatccttctgttaccacttcaaggagttaattaatatgcgtgaacttgaaatccatgagatcgaatctatcggcggtgccgacatgcatttggttgaaaatcttgccgctggtgttactgctggtgcgactgctggctacatattctttggcccggcaggtgcggctctgggtacggtaggtggtgttgtagccggtatgtggacttcgatattaggcggttaatgatttagttggttggccgggtgatcggctcaataatgagcttgtcctcctcagggtggatcagaacacgatcacccggcagctcgaattcaacgggaattcgtaccacctggctacgattatttcggaatagcttcgcttccttggtacgtgataacggagatgaaattggcatcggcacggtacccattgcatatacatatttgtatatgcatgaatctgcatgcctagcattctcgtcggtacatctcaccccggtgaccaacacccaccacaaggacgcgcaaaacgctatcttgaatggcgcagacgacccggaaatcaccaacacgataacgccaaaagccgccaagtggtccggttaatgctttaccactgctgcgtgggttttctagtccggcgatgcgctcatccatgaaatcgacaatgcgccgcgccatgtgcttgtcgagtttgcgtaactgctgcttggccgtgtcggtgtaatcaatcgtccaggccaagcgttttcctcacgtcggcagcagaatgcacctgttcttgtccatgacggacacgctccaatacatcggcagcaaggtagtaatcctccatttcctcaatgccatgctcaatgatttcacgcaggtagtaagcctttgtgcgtcccgtatgggaggcaagatagttcagcctttgctccatttcaggagagaggcgaatcgaagtcgccatgtcaaaaccctcacttagatgcatgtattcatagtagcgcagatgagatcgcccaatgggcatctccaaagctgactccctgcttcaccgaaacaggtttccaccccctcatgatcaccctgacccaccgccacgtcggcaccgtcaccctggatgcggtgatggaagaaacgcaccaagccgagctgcgcatcactgaaaaccccgtagagtctggcgcgatgattggtgatcacgccgtcctgatgccgcaaaccgtcaccattgctggcattgtggtggactaccaacctcagcgcagcccagcccctgccgcagaggagcacggggccgagccattgcgtgtcctgacagatcgcgtgcctttccccacggacctgctgcccttcaccgctcaggcgctgcgtgtggcccaacgtgaactgtcctcggtgatccgccacgccactgcaccgcagagcgacggccagcccgccgtgcgccctctggccgattggctgccggattttcagccggtccccccccgtgatgacgctgccaccacaggacgcattgcccaggtgtacaccgccctacggaatctacaacgcagcggccagaccctggaggtacacaccggcgtccagacgtatcaagacatgttgattctctccattgcggccagacaaacccaggatggttccattgaattggtgctgacagtgcgagaactattcatcgtcaagacaacatccatttctggtgtctcattgcccgcccccaaacgcggtagagcctccgcccaaggcgcggcgcaacgccacagcggccagacccaccctaagccggtggacaccgagaaaaatcgctccttgctacgtcagatgtctggactgttctgatgcgacagattcccgtggatagcagcccctaccaaacccaatcctttcagatggccggggacgccttacgcttgattctgcgatggaatccggtgccctgctgctggtcgatggacctgtacaccacgaccctagatcagcccgtggcgcaaggcgtccccttggtggtgggcgtccccctgctgtggcggcgtcctgtcgattacttcttttggctgacagatgaaagtggtttggagatggacccgatgcgccaacaggacctaggcgaacgctgcttgctgtttgtcggactgaaacgcgacgttcgcccatgaaacagtttggccgccagtatcgcctggagattggctcggcccaggagggcatcgccattgatacattgcgcatcgcctttgacatccgcaaaaccagcgactccacccccaatcccgccaagatcaccgtatggaacctcaaccgcgatcacctgagcttgctcaccagccgacagtacaaccgggtccggctgctggccggttacgcagagctgcgcctgttatttgtcggtgacattatcaagcctgctgtgcggcgtgatggcacggattacgtcattgaactggaatgcggcgatggggatcacgactaccgtaatgcccacgtgtccttctcgttggccgcaggggcgaccgatgcccaggtactgcgggcactgagtacctccatgccgtcgacccgactgggacctgtccagatgcagggacagcgtggcctgacccgtggcaaagtgctttcgggcaacacacgaactctgctggatgcactggctaaaaatcatggcgcggattggtccatccaggatggcgcactgatgttactgcctgccgataccgtcctggctggtgacgccgtgctgctgtcccaaagcagcggcatgatgggctcccccgaagtgaccgatgatggattaaaaatcaccaccttgctcaatccggccttgcgtatcggcggcctggtgcgtgtggactcgatcatccctatctataacggcgactacaaaatcacctcactgcatgacatgggcgatgtcatggccgaagcctggttcagtacggtgacctgtgtgggcggtgattttcagaacgtgaggccgtctgtatgagtctggacgactggaacaacgcctcactcagtgccgtgttggaacgcagtaccgaagcgctagcccagcgtctgcgtgtggccttgcctgggcagatcgtccgctttaacccagccacccaaacggcgaccgtgcagccgttgatccagcagaagaggaacgatggctcccttcagcccttaccggtgctccaggatgtgccggtgtccttcccacgtggcggcggctttgtgatgacctttcccgtcgctgctggggatgaatgcgaactcatcttccaagatcgctgcatcgatgcctggttccagtcaggccgtgcgtccgagcctgtggactatcgcctgcatgacctgtcggatgccgtggcgcacgtcgggattgcctctttgcccaatgtcattccgacgtttgaaatggacggcgtggtactgcgcaccctggatggccgcgcctcattcaaactggatacccagggcgtgatcacactgcgtggaaccaagctggttcttgatcttcccgtggaattcacccagggactgcgtggtcatggcgacgtcgtatcaaacagcatccgcctggagacacacacccacggcaacgtggagaacggcccaggacagacaggcccggcccaatgagagtgcgccgcgtggacagccaaggggattggaccttcggcaacgggcgcggcaactatgcggctgccagcgattgcgtggcacagcgggtgaagacacggctgcgctccttccgtggcaactggttcctggatctggaccacggcctgccgtggctggacctgatggagcggcctgccgacctggtacacctggagcgcgaggtcaagcgcaccatcctcaccaccgaaggcgtgcgccgcctcaccgccttctcaatggccttggacgcggatacccgcaccttcactatccacgtcaccttgctggatgtggagcagcaggcgatgaccgttcgcaccacgctgtgaggggatgcgcttaactcatagaggaaggagtgaatgacatccgtaaaccaagcgccttagccacttttaagatggttgagaagcttgggttgccgtcattagagagtgctttgtctagtccttgcctggacatgccaacgtcacgagcaagctgacttaaattacgagcacgagcgacagcaccaagtgcccgtgcaataaaagcaggattatccctaccaccttcttccatgacggcttccatataagccgcaatatcttcttcggttttgagatagtcagcggtgtcgtatcgactaaacgtctcattattcatggctcatccttccacagtgcagccagtgccttggcctgctcgatatctcgcatttgtgacgatttatcgccaccgcaaagcaagagaatcagtactgcaccatgcttcataaaatagatccgatatccgggcccatggtcgatcctcatttctgagatgccagcacccacaggcttcacgtcgccgggattgccaagtgcgagccgatcaagacgcgcttgaattctggcggctgctttgcggtcacgtaagctgtttatccaagcatcaaaagtgctggttttgatgagttcgaccatgtgcaaactttagtttgcatgtcgttaagtatcaaccacagttgataacggaaataaaatgaacgaccacacccgccaccttggcgattgagcaaaccatgggaaaagtcaccaccaccggatatgaagccgaacggctagaaacaatcattgccacattgcaagaaggcttccgctccatttacggcaacgatatcaatgttgatccggacagccccgatggacagttgattgggctgattgcacagatcaaagccgatctagaagaactgggcacggacatccaccggcaactggacccggattacgccagcggcgcgtggctagaacaacgcgtggcctatgcgggcctcacccgcaggcgagccagctacagctacttacgcaatgtcaccttgagcggcacacccgatgccccgatcccggcaggttatgttgtttccgatcccaatcgctgccgctggcagctcgtgtcatccgtgcgcctggatgccaccggccacgcccatgcagactttcgcagcgacgccttaggccgtgttgacgtccccgcacacacggccctgaccattgaaaccgtggccctgggctgggactcggccctcacgaccgaggacgccgaagcaggggcagaagaagagtccgatgcggcgctgcgcgcccgcttctttaaaagtcgcgccaagacatccaccaacaatgctgacagcatccaggccacgctctgggggctgcccgacgtgcgccacgtcgtctgcttagaaaacttcaccgataccgtggatgctgcgggagtccccgcccacggcattaacgtcattgtggaggggggcagggatgacgccattgctgaagtgatctatcaccataaaacgctcgggacaaacatgcgtggcgcggtgcgggtacagattaaaaacacacacggccaacctagagagatctattttgaccgtccaacgatggtccgttgcgccgcccgcatcgaagtagagcgcgatagcagcacgtccggtattgatacccatgcgatcaaacaggcattggccgagcgctcctttctgattggcgagcacgtccaccgcagccgactgtatacccaaattaatagcgtcccaggcttttgggtgacatcgctgatgatcggtcaagcaggccaagcgttgtctgagcagaatattcctatcgacgtgcgaagcatggcgcgctttgcaatgaacgatctccaggtcatcgtgcgatgagctatgcggacctgttgatctggcaatacaagggccaacccagggccaccgccaccgctgcattgatcagcgatgccttcggcaccacctggaacggcttagccgatctgcgccagacattggatatcgaacgcgccaccggaacacaccttgacctcatcggccagcatgtcggtcaatcccgtgtcttatccagtgaacgcccccccgtgcggcacgatctgagcttggacgatgcagcctaccgctttctcatcaagtgccggattgccaaaaattacatgaccggcaccgcgcccaatatggagcaagtgcttgacttcatctttcccggcagcgccgcagtactggaccactacgacatgagctacaccgtgtttgtcagtactgcaatgatttcagacgtcatccgccatgccatcaccacgctggacatcctgcctcgtccagcaggcgtgcgggttcgctacaaccttgtgacgcatctgcccttcggatacgagcgcagcaaccgtaactacacacacgccgcctttggcgacccacccgagcgataacccatgacagaacactacttccgtactccctttgcccaccaaggggacaggatccacgtgcccgaagccaaagacagtcacggctttgtgagctacacccaaggatgggggccggactatcaaaaagatttaaccaaggagccgacggctaaacccgtagaacgcactgttatgaatgccgtgctgcacgccatcaccacggtgctcaaaggctaccaagaatacggcagccctgaattcatcaccgccgaacagaataacggcacgccattttcatacatgcgtggtgtgatcgtccgataccgcccggatcacgcaagccgttacgggctgtatctgtccacggctgacaacaacaccgatacaccgctacagaatgaacccaaccgctggacggcactctccaggtatgagcctggacagattgtctacaccgcaggcaaacgcgccttacccggcaccctgctgtgcgatggccgcgctgtatcgcgtgccatgtacccgcgcctatttgaggaaatcaacaccagctatggtgccggtgatggtgtcagcaccttcaacattcctaattttcttgaaggcaccgtcggcgttcacaccgccgaccctgccttggtcggcaccttcaccagcgggcaggtgatctcccatgcgcacaccgcaaccgccgaggagggcggtacgcatcttcatcctgtcacaatccatcccgcagggcgtcatacacaccctgccagcgtagcagcggcgggcaatcatctacaccaggcatggaccgacgaacaaggattacaccagcatacaggcagcacctcttgggacggtgaccacgcgcatatcttgggttctttcagagcgatctatgcctctggaagagacatgggtttttatgagcaaaatcaaggcaaagtcacgaccaatgtcactggagggcatctacacagattcaccaccgatgcaaacggcaagcatgcccacaacatcggtatgcaggccgcagggcttcatgtgcatgacattgctgtaacagcagaggcagatcatgcccacgccgccacagccgaatcagcgggcaggcatggtcacaccgtgtccattgatcgctttggagaacaccacaacctgcccgcaggcctgcgcgtcatggcgtgtatcgcgtattgataatttattaggtgtatgtacatgcggaacaatcaggcaaccttgtgcggtagctgctgcagctcggccacgtcgagcgtgaaatccagcggtatttggatcggctgatccggatcacgcttgtggttgtaaacgtctacatcagtttttaattgcaaacaatcgcctacgatctgttggcggcgctgagcaaaagagcgaacgaaatggctatgtggcacaacaggatcatcaagatcagcccataatgacatcgttttattaccgttcttatgtgttgctgcgtgctttgcccgataacggcggccatgtggatcggttcggtactcttctcgaaatgcctgcgagatgtctgcagcaacggaatcaatgatggtcttgggattgggcttgtgtaatccattgctcagcgcccaggctgcaactttatggggatcaagcaggccattattgccggtctcggccttgtagcgttctatgtagtgtttcacttggttggaatatgcggacatccagagatacctccattattgttaattaattcattagtcggcgtggagcacaccccatccatcagtacgagcagagctggtgacgaaagaacgcaccttgacttgatatttgcgaaaaaaatcgtagcgatgcaggtaccgctgcaattgaccaactaccaggcccggatggatgttcagacgttgggcgaacatcaacacacgttcttccttgaaaaaaggagaaacccgtgcgacgaaccctgccaactcgttctggggcacacagaattctgtacccgcatcattggcgatcttttcatcttcggtgatcattgtgtctgattcagagtcaatctcctgatccaggatgtattgctgatttcgcgcatgatgctgcagtacatgttccagttcgtgacgcagcacgaaccagaagttgtcaattctatccaggcgcagggtcatagctacgaccggcttgtcgtcggctagccagaagcaagcaccatcaatcttagtgcccgcaattggttccacgatgacgaaacgcacgccacactcgtggagtatccgtgccacatggcgggtttcctccggggcggttctgagtgttgacaggcgcgacaatgattggtgcaacgctacctcgctgtaagcactcgtgatcagctcgtcggcaacttgccatgcgcgacgcagccacgccaattgcaagttggacactgcggagttggcatcagtctttttggccgcatgggataaaagtatttgctcgttcaagtgtttgatgccaaaaaactcaagaacctgctgttcaagcacatcaatattcttcgatgcactgatccatccgcgctttatcatttgacgaatcgggaatcggctgtacaactcagctcggcgtgatatctgttcatcaacgccgctgactttggagagctggtactggctttcaagattcatccagacttctggacctgtccccagcgatttacccaactggatggctgtctccggagtaatagccttcttgcctgcaatgatctcgttaatcgtgtgtaccggacgaccgatgatttcggccagttcagtttgcgtccaatgacgtgcctccagttcatcgcggaggaactcgcctggtgggaaaacttcggcgaacgtgttcatggcgtgctcttgagttcagtggtaatcgacaattgaaacaatgacgactagatttcttgtgtcatcttcttttgcttttaggtacatgatcaggtgccattggtcgtttaggtgcatggagtacaggttgtccggatcatctttgagtttttcgtagtgcagtgatttcatggcatagaacgcacgttcgtcaggcgatgccctgatgaactgtatgcgccggtggaacaccttgaccaagccagcagtgtatttctggtttgcttccagtcgctccaacgatggatcttcaaacttgacttccatgcggcttcataacctcaatataccactattacactaagggtaatagtgatgatatttgatttcaagcgacacctatcccttccaagattgagagattgatgatcaaaataggaagtcgtgcgggtatcagtgcctaccaaaacccttacatcgcgttgcggcattttctgataccaccgttccgcttcatgcggcatcttaatccttgccggacgcggggccattgaggccgctccacccgcgaggcgctggagcagcgcctctaccggcaccttaatttgaccgctaaaaaaggtttttcgtactgaacatgtaccactacaccgaatcaggcctaggtaatgtgtggttacgcaacgggtttacggtgcacaagacaccctatggtgacggcattgctattgctaatttaccaagtctccatagaagcctttccctagcgctggcgctgaaaccggccaccctttcaggtgccgaaatccgtttcatgagaaaggaactcgagctatcgcagcccgagttcgcggttcgtctgggcgcgacgacgcagacgcttgcggcttgggaagaggggagggcggcgcttccaaacgccgcagacaaaatgatccgcgttctaatcaatgcgcattataaaaggtgataggtggatcggttaacctcaaatcccacgggtagaatccaaggtgtgtttctactccgcaatttctcatttccatcaaaaatcccctgaaaataacaattagtaattttactcattgcggagcttattattaagataagttattgattattaatgctaaaatatgatgcatataatgcttacttcaatttgaggtgcttggaatgttgcaacgattcgaaaccggcgttcgtatgtccgagatgacggtgtaccgtggggtttgctatctggcgggacaggtgtctgaagatgccagtgttggtatccgggggcagactgagcaagtgctggcggagatagaccgactcttggcgcttgcggctagtgacaagagtaagatattgagagctgaaatatttctggccgacatcaatgatttttctggtatgaacgaggtttgggatgcctgggtaccgcagggcttcacgccggcgcgtatgacggtacaagccaaattggccgatccggcatggaaggttgaaattatggtgactgcggcagtttagttatctgtttggtcgccttttgatgatgactaagcggtgattgctattctagatagccgtgtttttctttcttaattgtcttgctttcaagtgggcagccgacactggattgtaagcattctaaatactgattttggtgagactgccaagagatcctgaatgcttacatttcgtagtaaaagtcaaggtgtgaatgctgccttctgtttcctttatcatcactttgttttggtcaagctatcttagtggggattttaagataacatcgctggatatggcctcgtggcgcaattggatagcgcgacgacctcctaagtcgtaggttgtgggttcgaatcccgccggggccaccaaaattttagggttactaagtattttattttgatgttgtttttcgagtgtgtatatcgagtgctttgttatttcttttttgagactctaatcagcttaacagattatgttggtgtgttttgcgaatgaggcgcgtttatggtcatttaatgtggtattaggagatgctagttttagttctagttggagctgttatttttcgaatatagcattgacttgcagactttaggggtataccagaaaagcctatcggtttcactttattctagattattggttgttcaaacgtattgatgtattacgtgttcttagggaggtgaaattatttctgatgaaaaggagttatataacacagattatttaagtcaattttcttttatgttatccccttattgaatctttactagagatcttgttcgtagcgtacgtaaggtactgtgccgtccttgctactctcatcgcttggtgcaaaaggattactgccacggctgatgatattttctgccccgactgagaaatggccgctccaaggggtgcgccaagttaggccaaaaccaatacctttcaatttttcgggactgcggccagcagcgtcgacgacacggccaacgatgtgggcactgaacgatccgtaaccaccaccgatgctgagggttttactgtcccactgcccagcaagatcgggagcggcatttgtcaacgggactacacgggcacgagcataggtgccgcctatggagacaaagccttctctgcctgcacttttctggccaaacacagttaagttgttctgttcgactttggtcaagttaaaaggggtatttccaaataaccatgctggcaggatattgcgcgctctactagcggtgaatccgaaccgagtcgatttgtgattaaacaatgcagtcgctgcgatctggcggttcacattatctgcattaatttcgtccaagctggcaagcaggcaatgcatactcaaaccgaccatgctgattccagtgccattgttacatagcagtcccaatgaactagtgggagataaaccaaaggccatgtccaacgaatttttgttgaagttccagtgtgtacccactttctgttcaccagcaggttctaggtacagtagggcttcgactttgccactgcctttattccagattggcagtactgtgctgttaatagagtgagaggggaccgttgactgcgcactcgcaggaagaatagccgttagggcggctatcagtgcaaggagtagatgagtcaagtttttcattgagagtgagacctggtaaacatgggccaagttccccaaaagcattgacctgatattaggtgtcttatgattatttaacaagatgaaattatttcagatagtgataatcatcatgttgttatattttaagttctatcgaattttcctcttccgttaaggaaacaatgcgtcaatttctttgtaagaaaagtggtatttttgtctgcagaattcgcattctactttgattctgccgttagcttcgagagtggcgcgggcttcgttttcaccaagtctttgcagcattgccgcgactttttcgcgtgaacaggagcagccaaagcggagctgacgtttttctaattgttgtggattttcttcgtgaaacaaacgatgtaacagaacttgtccggagagttcgagcagttcagatgcttgcagggtgtcgaatagggcgcaaacgcgtggccagccatccacgtcgtcagtatgactaggcaatttttgcaatagatagtcccgccgcccgctttccttcggctgccagtaagatcctggttggcgtctgttcagaattgcggcaataaatttcgaatgcttcagtcaagttggctgcatccagtgcgatgaggctttggtgacgctgtagcttatctggattgagtcttgaactttcgacagtgattgccagcagggcattgtgatctaattcgcgcaaactggttggtgcttcggaatgagaaatgtcctcggccatatggacagtgccgcgcaaggtgccggatgtcgtgcattcggcaaacaatgtgcgcagcgctgttttgctgtgcaatgtcactgagaggcgtccatttaccttggtgtgattggcaaatagcgccgccgctactacagcttcaccaagcagtcggcttgcaaatgcaggatagtgggttttttcctggatattgctccaagtttcgttaagactgacatggataccacgtactacggcatgaggtaacagaaagcgtgtcagggagtcgtgatcggtcatgagttgagtgtcgagaacgcctgcttggagatagagagagcagatttaagtgttaaatggatgatggggaagcatgggatgtatcagtggattcaaagagatagtgacgtctatcaacggtggccctggtggcgtcgtctgctcatagtgttgctggtgttagcgttaatgagtgtgttacaggtgattgtttttcggtttgtcgatccaccgttgagtatgacgatggtggggcgttacttggaagcctggagcgataggcagtggaattttcgtctgcattatgtctggtgtgatttggagcagattgcaccaagtgtacccatctcattggttgccgctgaggatcagcgattccctcttcaccacggtttcgactttgatgcaatcaagaaggcacttggccatcactcgcgtggtgggcatctgcgtggcgccagcacaatcagtcagcaggtagcaaagaatctgtttctctggagtggccgcagtttcgtacgtaagggattggaaggttggtacacgttttggatcgaacttttttggcctaagcgtcgtattttagagatctatgccaacattgctgagtttggtgatggtgtgtatggcgtgcaggctgcagcacagcgttacttagagaaggacgctgctgatttggatgagagcgatgcggctcagttggctgcggtgttgccttcgccgcgacgttataatattcaggatcctggcccttatatacggtggagaagttcatggattcaacgtcaagcagaacagcttggcgggtcggcataccttgatatgcattaggatgcattggcgttcgttttctatatgctttgatgatgtgtcgccgattccaaattgggccattattggcccttggtcgctatacaacttaagttacgctgcaccgtagcgtggttggcgctgtttggtcatgcctgcaaatagatgttgatggatttctggaaacaagagagcagcaatgttgcgatctcttcatgaattcaatctgagggcggaagcctgaaggcggccatgctttgtataagacatggcgatctgatagaaaacacgccaatttacggaggctgatcaatggcaagcccccacgcataatagtgccgaaagcgccttaatatttataaggttgcagatcgaatctagccacgattatctgattcaaacccaaagcacctccgagacattcgtgaccgttcataccccggaaggacgtttcttgcaaaacattgacatgagagaaaagcccgaaggtgggaagggcatggcagaacataccccactgatgaagcaatacttcgccgccaaggctgagtatccagacttacttttgttcttccgtatgggagatttttacgagctatttcatcaagatgctcgcaaggcagcgcggttactcgatatcacgttgactcagcggggtagttccggtggtgctccgatcccaatggccggtgtacccgttcatgcctatgaaggctatttggcgcggctcattgccctgggtgaatccgttgcgatttgcgaacaaattggagatccagggcttgctaaagggttggttgaacgtaaggtggtacgcatcgtcactccaggtacgatcactgacgaggtgttactggaggagcgtcgcgacactctattgatggccttatcacgcagtaaaaactgttatggcttggcttgggctgacttagccggtggccgtttcctggtgaacgaagtcaatagcgaggaggcattagaagccgaactcgcacgtctggagccagctgagctgttactccctgacgaggatgcctggccagagtatctacagcagcgcaacggtgtgcgtcgccgtcccccatggttgtttgatgctgacagcggccgccgtaaattgctggcgtttttcaaactgcacgatttatccggcttcggtatcgaaaacaatccacaagccactgcggcggcgggtgcactccttggctacattgaggaaacacagaagcagcgtctaccgcacctgacttcaattacgatggagactgttggcgaagcgattacgatgaacgctgccacacgtcgccatttggagctggacacccgtgtggatggggagagccgccacactctgcttggggtgctcgatagtacggtgaccccgatgggcggacggttgctgcggcggtggctgcatcggccgctgcggctgcgcgaggtggtaagacaacgtcatgctgccgtcgggagcatgatcgatagggatctcgataacaaactcatggagactttccgcaggcttggcgacatggagcggattttgacccgcgtggcattgcgctcagcacgtccacgtgacatctccacattacgggatagcctcagcctcctgccacgtttacgtgagcttctcaatgcatcggattccccgcgcttgcgcgtgttgtacgccgagctgggtgagcatgacagcaccgcgtctttattggtaaaagccgttgcagaacagccacccttaaagctgactgatggcggtgtgatcgcctcagaatacgatgtcgaattggacgaactgcgtaagctctccaacaatgcggatcagttcttgatcgatcttgagacacgcgagcgtgaatccagtggtatttctacgctgaaagtgggttacaaccgcgtgcatggttactatattgagatcagcaagggccaagccgacaaagcacccgtgcattacactcggcgtcagacactgactaacgccgagcgctacatcacggaggaactgaaagcgttcgaagacaaagtattatccgcacgtgatcgtgcgttggtgcgggaaaaattgttgtacgaacagctgctggacaccgtcggggcgcaactggaaccgctgaagcgttgtgccgctgcgttatctgagctagatgtactggtctgctttgctgagcgtgcacagacattggattgggtgcgtccggagttggagcacacatcatgcttgcatattgagggtggccgtcacccggttgtggaagcggtgcgtgaacagcgattcgagccgaatgaccttgatcttcaccctgagcgccgcatgttggttatcaccggccccaatatgggaggcaagtcgacctacatgcgccagaatgccttgattgtcctgcttgcttatatcggcagctacgttccggccagccgcgcgctgattggaccgattgaccgcatcatgacccgtatcggtgctggtgatgacctggcccgaggtcagtcgacatttatgcttgagatgacagagaccagctacattctgcaccatgcgaccgcgcagtcgctggtactgatggacgaaattggtcgggggacctcgacttacgatggcttggcgttggcggatgcagtcgcacgccacttagctcatatcaaccgttgttatacgctgtttgctacgcattattttgagctgactgcactagccgacgaaacatatgagggaggtctgagcggtatcgctaacgtgcatttcgatgctgtcgaacatagtgaacgcttggtgttcatgcacacagtgaaggatggcccggccaatcgcagttttggcctacaggtggctgctttggctggtctaccagctgcggccgtcgcacacgcacggcggcgtttagctgaactggagcagcgaggccgtgaaagtcatgtttcagaaataacaccgctggcattggatgcaccgcagcagtgcagtttatttgcgtcggcgccctcagcagctcaggaagcattggttgcattgcatccggatgagttgacccctaagcaagcactagaagcgctttaccgactcaaagcgctgctataaccaacaccagtttcagagaggagttaatcgcggcgcttaaacagtatggtgaaagtggaggttgggtagggcacgtgcaccgtagattgcctgtcctacacgtaccaccgtcgccccttcttctatagctatttccaaatctcctgacatgcccatggacagctcggttatgtggtggccctggggtgatgcttgttggatgcgatctcgtaggatgcgcagctgcgtaaagcattgccgcacccgcgatgtgtcaccagagagcagcgccaacgtcatcaaaccgcgtacccgaagcgctggatatgcggagagtgcctgtacgaaacggacaacttcttcgggaggtaatccgtatttgtttgtttcaccggaggtattgacttgaatcaacacgtcaaggctacgtccctctatctgaagacgtcgctccaatgcttctgcaacacgcaaactatcgagtgcctggaattccgaggcaaatcgtgcaactagcttggctttattggtttgcaggtgcccaatgaccgaccagtgtagatcagtgagatcgctcatcgcttcccacttgtggtaagcatcctgcgctttgttctcccccagcttcctgcatccggcttcgtaggataatcggatatgcacttcatccacggttttgctgactggcaacagcgtcacgctgctgggatggcggtcaacacgttggcaggcagcaatgatacggctatacaccttggttagattgctgcgaatatcttccacggtcagtgtttgcaagccgcgtattagatcggcagcatatttcacagataaggcagtcatttgattccccctcacagaatttgtccgacatagtgcgcgtttattgccttgctcagattatctgaaactccgctaaggatattctgtatgtgcttaagctaattgtgtttcgaatttcaatctcaatattcaattctttctgcaatgctatatggagctgcatcgtaggcataagaaacgagtagcccttcagttggattggagacagtagccctatccgtgaatgtgtctcaaaggcttggcaaatccgaaatgtggtctacaaaaatagctcagttggtagagcgcaaccttgccaaggttgaggtcgcgagttcgagccttgtttcccgctccagatagtgatctacagacttctactgacgtctgtaagtcgttgaaaagaggggcttcggccccttttttcattccagcgagcgccacggaaatccacccacagctaccgtttttgagtgaccaattgaggcacaagaatacggttgggacggctaccggatagttgctggggctgagcgggaaccatgacgagcattaggcctaagtcataacttaggagcctcgaaatggcactctctgatctgacagtccggcaggcaagaaccaccggcaagcgctacaccctctccgataacgactgcctgggcctgatggtctctgccgcaggcggcaagtcgtggatcttccgctactactggctgggcaagcaaaagcgcatgtccctgggcggctatcccgccctcagtctgcgcgaggcccgcgccgagcgggacaaggcccaagccctgctcgccagggggatcgatccccaaatcgaacgcgaccagcgccggcacgcggccaagctggcgggcgaatacaccttcaagaacgtcttcgatgcctgggtcgagcatcgccgcaaggaactcaaggaaggccgccagagcacgctgtcgcagatcctgcgcattttcaacaaggacgtgctgcctactctggggaagatgtcgatctacgacattcgtcgcccccaactcgtgggcgtcgtggcggcaatcgagaagcgcaaggcgttcaccaccgccgagaaagtccgcacctggttcaaccagatgttccgatatgccctggtcatcgccgaggggctggaagtcaacccggccgcggacctggacgtggtggctgagcccaagcccccggtggctcacaacccctacttgcacctgcccgagctgcccgagttccttcagaagctccggctctacaacccccgcggctggcagacccagcttggcatccggctgctgttcctgacgggggtccgcaccggcgagctgcggctggccgaacccgagcagttcgacctcgaccggggcttgtggatcatcccaccgcaggtcgtcaagcagcttcaggacgaaatgcgtaaggccgggaagcgcccgcaggacgtgccgccctacatcgtgcccctgtccctgcaggccatcgagatcgtgcgctatctcctgggcgtgatgcggccggcgcagaagtacctactgtcgcaccgcagcgaactcaagaagcgcatcagcgagaacaccatcaacaaggccttgcagctcatgggctacgagggacgcctgaccggccatggcatccgcggcaccatctcgacggcgctcaacgagatcggctacccgaagatttgggtggacgcacaactatcgcactccgaccccaataaggtcagctcggcctacaaccacgccaaatacgtggagccgaggcgccggatgatgcaggactgggccgatcgcctcgacctgctcgaacagggtcaagtggaagccgcgagcgcgcacctgaccatccgcatcgacggcgtgccggcgatggctgaagtggaggaagcggtgggcgcggtggacgcggtggacgccgcccccacggtggccgagcccgctgtccctggcgtgccgcccgttgtcgcaacgcccatcgtcgtgacgccgaacagcggcgggatcacgttccagcggctgtcgcaggtgcccccgccgccggtgcatgccccggagccggaagtctccgcgatccagcgcgagcgcgaggaaatgctggccatctacgagtcgccgaacaatctgccggttccgctgttcggcaagctggccgggaagtccaaggatcagatcaaccgcgagctgaaggcgggcaagctgctgtccatcagcctgggcaaccgggggcagcgggttcccgactggcaactggtgccgctcaagcacaggctggtccaagtgctcatgaaccagtgcccgcacgcggattcgtgggacctgtaccgcatgctgacccagccccatcccgacctgggtgatcgcgcagccattgacgcggtgacgccggccaacgtgcccgcgatcatccgggtcatcatgggcgactatcagcaacgcgaggatgtgcccgaggtcgttgctccgcgatccatccctgatgatgtgcggctgagcgttcgtcggctggtggatagcgccgtggtgcttgagggggcctaacccacggttccgcctatggccgggatgacgctgccggccataggcccatcaccttgcaccagcaccagcaccagcaccagcaatttggagcgctctacgctcgaagcgctcaacaacggaactggcttgcccgtgtggccgctgcaggtacgtcacaatctcgtaagggccatcagcaagcggccgcatgatgatcccccatccatggccatgctcgatgcgcggttgcgcggataccccgacgccgtagccggccgcaatccatagcgccatcatctcgaatgaagacacctgctggatgttctcttggtccagcggcatgagggaagccagcttctcatccagcaaggggcaagcctcggcctgccagcggtagatggggtagtcctggaggtcggcgatggtgagcttcgcgcggtcaaataaatggaaccgcggcggcatggcaaccgccaggttctcggtccacaaaggttgcgtcttgagtgccgggtcgctggccccttgaagcgatagccctgcgtcgtagcggccttcacgaagtccctgaagcaggacgtcacctgcaacctcgaaaaacgcgagcgcgacgtcaggttcttccgcgcgttgtcgcgcgagaagcgccgagaggtgagatgacggtacgcccggtgctacggcaagtctgatacggggggaccgactggcggcgtcgtgcataagagcccccaagaagagaattggttaagaaaataactcgacatgatacccatgagttaaatttaacgtggttaaattctagttactgctcgacgcttctgctaatgcagaagcgtactgttcaacgaggccgtcccccaggcacaacccgatatgaagccgagccagccctggctttcgggaaggccgtgcgcgcgtttcgtatggaccagggcgttgctcaggaggaactggcttcgatggccgggattgagcgctcgcacatgggcaagatcgagcgaggggagcatttgccctcgctggccgtgatcttgaaagttgccgcagcgctcaaaatgagtggcaccgagctgatggctgcaacggaacgcaatcttcatgccgatgcaggataacgccaaatagacttctatccgtctgcctgcgagcgcaggcgggtaatgaagcgctccaatgcagggcacggtgcgtcactgcggggccgaagcagataggtggtgatcacggctgaatccgcgaccagagggcgggcgatgacatccgcgcgttggctgaccgcaagcctggccgcggtcgtgaagccgagaccatatccggccccgaccaacgtgagcatcatgtccagcgaggatgcgtgctcgaccacattcggttctcgctccaacggccgcagcagccttgtcagttcgcggcaatagccttcgcatacctgcgggtcgcacagcacgagcggataggaagcaagctctggaagcggcacttccttgtgagcaagaagcggatgtcgcgcgggtactgccaagatcagcgggtcatgccatatcggctccgctcagtcgaatttcaatctcaggttcctcctcgcggcagtgggcgaggaaggcggacaggcgctggtcaacggtgccatcggatatggcgatgcgcaggctgccctgcaaacctgcggcgatagccttgacgttctcccggccctgctccagagccgcgaacacccttcgcacgtcttgcaggaatgccgatccggctggggtcagacgggttcctctccggtccctgtcgaagagtgttgcgccaagctcatcctccagttccttgatggctcgggaaagcggcggctgctcgatgtgcaggcgctcagccgctctcgtgaagtgcaactcctcggccaagacaacaaagcatcgaagatgtcgcaattccatgagccgcgctcctattgaactctcgaaagtgttctgcgtatggcaatcgctctacgcaacagcgcctcccatcgccatacgacgtgatgggtagcgtgcggaatcactccgcaccgaaaggatcgccgcattggctcagaagccaacgcctgggcgaaagcgcaagcgttaccaggcataggccttgggtgcctcgccacccgggccaggccaaatctcgtccagcttggccagcgtctcgctggagaggttcagcgacagtgccttgaggttctcgcgcatctgctcgacggtacgagggccgctgatggcagcggtaacgactgggttgtggatcacccaggcgagcgccaccacggcgggcggctggcccagttcgcggcacagcgcctcataggcttccagttgcggacggaacttctggatctgcgcctgtaggcccggcgtcgcacgacgcccctcggtgatcttgcccagcacaccacccaacagccccatgccgatcgggctccacgggatcaggccgatgccgagttcgcgcacggcgggaatcacttccagctcgatggtgcgctggatcaggttgtagaggctctgttccgagaccaggcccaggaagttgcgcgattcagccacgccttgtgccctggcgatgtcccatgccgcgaagttgctgctgccaacgtaggtgatcttgccttcgcggaccaattgctccatcgcctgccagatttcctgccagggcgtcgagcgatcgacgtggtgcatctggtagaggtcgatgtggtcggtcttcaggcgcttgaggctggcctcgcacgcgcggcggatgtgataagccgacaggtacttgtcgtttggccccgtgcccatcggctggtacaccttggtcgccagcacgatcctgtcgcggcgggacttgtcctgggccagccagcggccgatgtattcctcggatgtgccgaagcctttctccatgtccggcgtctgcgggccgccatagacatcggcggtgtcgaagaggttgacgcccgagtccagcgcctcgctcatgatcctgaagctgttcggctcgtcggtgagttcgccgaagttcatgcagccgagcgcgatgcggctgaccttgaggcctgtgcggcccaggtgcttgtagttgcccgatccgatggcgcgggcggctgctgcggactgagcccgcgcggtgcccgcagacagggcgccgatcagcggtgcggccgcgaggctggccatgcccatgccggcgagcttcagcaatcgccgccgtcccagttccggggtcgcaggattgaaacgaatgggatcggcatcgccgttggtattgagcatgtcgcaccttcttgttgacagggggcaaagagagaggcccgcggccccgcgcgaaggccccgccggcccttcgcataaccaagcaaaagggcgtgccggggagatgagcgcgtcgcccgtctccccggcaagccattggcttcttaccaggcgtaggcctggggagcttcgccgccagggcccggccagatttcgtccagcttcgctagggtctcgtcggagagcttgaccgacagtgcgttgaggttctgctgcaactgctcgacggtgcgcgggccgctgatggcagcggtcacgaccgggttgtggagcagccaggcaagcgccacgtcggcgggcgtctggccaagttcatcgcatagcgcctcataggcttcgagctgcggacgcagcttgtcgatctgcgcctgcaggccaggcgttgcgcggcggccgctggcgatcttcttgagcacaccacccaacagccccatgccgatcgggctccagggaatcaggccgatgccgaagtggcgcagcgccggaatgatctccagctcgatggtgcgctgagtcaggttgtagaggctctgctccgatgccagccccagcaggttgcgcgaagccgccgtgcattgcgccaaggcgatgtcccagccggcgaagttgctggagccgacataggtgatcttgccttcgcggatgagttgctcgaaggcctgccagatttcttcccagggcgtggcccggtcgatatggtgcatctggtacaggtcgatgtggtcggtcttcaggcgcttcaggctcgcctcgcaggcgcgacgaatgtggtaggccgacaggtacttgtcgttggggccggtctccattggctgatagactttggtcgccagcacgatcttgtcgcgacgggacttgtcctgtgccagccagttgccgatgtactcttcggacgtgccgaagcccttgggcatgtcgggcgtctgcgggccaccatagacgtcagcggtatcgaagaaattgatgccggcgtccagcgccgtatccatgatcttgaagctggtcgcttcatcggtcagctcgccgaagttcatggtgcccagtgcgatgcggctgacttttaggccggtgcggccgagatgcgtgtagttcatttcgtttcactcctgtaattccgcggtcccgacgatgaaccgaacgggatgcggtgatgattgggggttattcctccggcggcgaggcgagctggccgtagcccgggcgcttgagcaggcgctcgcctgccgtctcgatgtcggggccatagacctgctgcatccagtcctgcatcggcacgtcctccaccgcgacggacacggcgctggaatcgagccccagcacgtccatcatggtggcggccagccggtcggccagctcctgcttcaagggctggcttcggccttcggcgatcttgacgatgatgtgcggcatggcctggctgcccgattacggaacgacgtagccgccatcgacggtgaggccttcaccgatgacgtagctgccacccgggctgcacagccacagcacggccgaagcgatttcctcgggacggccggcgcggccgatcggcgcgctcgcgcccagcttggcaaaggcttcgtcgctgccgcccaccacgtcgcgggcgatctgcgtgtcgatggtgccggggttgaccgcgttcacgcggatgcccttcttgcagtactccagcgcagcggcgcgggtcaggccgaggacgccatgcttggaagcgatgtaggcgccgatgccgacgttgccggtcagcgcgccgaccgaggcgttgttgacgatgacgccgctgccctggcgctgcatctgctgcaactcgtacttcatgcacagccacacgccgcgcaggttgatgccgatcacccggtcgaattcttcgctggtggcctcggcgaacggggcgatcttggccatgacgccggcgttgttgaaggcgaagtccaggcggccatattcggcgacggtcttctcgaccagtgcggcgacctgcgcctcgtcgctgacgtcgcaggccagaccgatggcggtgcccccttcggcgacgatcgccgccgcttcctgggcggcgcgctcgccgtcgcggtcggccagcaccaccgatgcgccaccctgagcgaagccacgtgcggtcgccaggcccatgccggcggctgcacccgttaccagggccacctggcctttgaagtcataagttggattcatgtttcagttctccaatatcgttgataacctgatgcagcagagtgcccgacgggttgcaaggcaagcgcttgtggcaatactgcttatccaccgagtgttgcaaaaacctggtcggctgactacctgatgaatacttaattcgcctattagttcggctaattaattaggcatttctggtagtgttcaaatgacgatcacgggcttgatcaccgcggggtcgcggctgcgcatcagctcgatcccctgttcgagagaatcccatccatgcaggacgtggctgaccagcggccgcgtgtcgaatcgcccgcattcgagcatcgccaacaatcgctcgatccagtctcggccgtcctgcacgtgaacgccggtcaggaatttctccatgaacccgtagttccacacctccagcgggatggtgacggattcgtcgtgcaggaagccggaaacgcaggccacgcgaccgccgaacttgacggccttcagcgccgtggtgaatacctcgctcgccgtaccgccgctggcgatgagcacgctatcgacgggctggcccgcggtcagggccatgaccttctccagggtctggccgcccgtgaagtccacgatgtcggtcacgccataggcccgagccaattcaaccgtgttcggacgggaatccacgccgatgatccggccggcaccgcgaagggctgcaccggcgacggccatcagcccgaccggcccgagtcccatcaccagcacggtttcgccgaactgaatgccaaggcgctcgacgccggtgaagccggtcgcggccatgtccggcagcattaccgcctgcaggtcggacaccttatccgggatgcgcgcgaggttgaggtcggcgtcgagcgtgcgcacgtactcggagaacacgccgccgatcgaaggatcgtcggagtagtacgggctgttggtctggtagtacttggcttcgccccgctgggcgcggggatggcgccagtccgaattgccgcacggcaggactacgcggtcaccgggcctgaaggccttcacgttctcgccgaccttctcgaccacgccgaccgcttcatgcccgatgacctttcccacggtcttgggaagcgcggcggtcgcgatcatgtggacgtcggtggtgcaggtcgccactgccgtgggccgaaccagtgcatcgttcggccccagcacgggcattggcacgtctttccacttggccgtgcctttggcttctagaacataacctctcatgtgatctcctaactcgtatgtgcgggatgtgaagcagcctggtcaggcgcgcgctccggccttgaagccgtgtctgcggcaggccagcgccgtcgccagggcgacgaggatcagcggcagcatggaagccggcaggacgctcgcaccgccgcgcgcaagaaccagcgcgcccagtgcgcccccagccgcgatgcctgcgttccataccgtggtgagcatcgcccccacgatgtccacgccctcaccagccgcatcggatgcggccgtctggatcgaggtcgcagcgccgccgaagctcgcgccccacaacatcattgcgggcacggcgaacagcgcggccgacgccgggctggtgaagaccaaggtcaccgcgacgaacagcaccaggctgccgatcacgtgcaggcgcaggtggcgatcgaccatgacgccggcgagccagatgccgacgatggcggccacgccgaacgcgagcagcagcaggtccacgtctgcgcttcggcccagcgtgccggcgaaaacggcgatgtaggtgtagagcatgtactgcgccgtgacccaggccagggccgtgaacaggatcgagcgcacgcctgcggagccgagcacgcttccaatggaaatgcgccgctcgggtggctggcccggcacgtcgggcatccgccaggccatcgcgacgagcagcagcgcggccaccacgctcagggagacaaaggcgccgcgccagccgatgatgccgcccgtgaacgtgcccagcgggacgccgatcgacagcgccaggggtgtgccgaccatggccaccgcgagcgcgcggcccttgaggcggtccaccaccatgcgtcgcgcgtagccgccgagcagtccccaggacagccctgccgagacgccggccaggaaccgcgcaaccaaggtcagggcgaaccacggcgagaacgcggtcacgagattgaagaagagaaaacccgcgagcgccagcatcagcaccggcttgcgtcgccgggtttgcgtcaggctgaccagcggaatggcggcgagcagcgatcccgccgcatagacggtcaccatctgtccggctgccgtcgccggtatggcaaggtcttgggcgatctgcgggagcagcccggccggcaacgtttcggtgacgatggcgatgaagccggtcattgccagcatgagcaaggctgcggtcggcagcgtgtcggcctcagcagatgaggccggtatgggggtgcgatgggtcaacgtggataccgcctggccgtggccccggcgagcgatctggcggcagatccaggcccgagggctcaaccggggggtcaaagtaaaaagcgcacgcctgctccggctgcggcagccgcagccggcaggccgtgcgcatgggttcaaccgcgtggggcggcggcatcgagttcggcgaattcctcgtcgctcagcgtgatcgccgcggcggccacgttttcctccaggtgcgcgaccttgctggtgccgggaatcggcaggatcacggggctgcgcttcaacagccaggccagtgcgatctggccggccgtggcacccttcgccttggcgagcgcgtccaccgcgccaccgggcttggcgagatcgcccgccgcgagcgggaaccaggggatgaagccgatcccgttcgcctcgcagtagtcgagcacgtcctcgtccgcccggtcggccaggttgtagcggttctgtaccgtcgccaccgggaagaccttgcgcgcctcttcgatggcctcgaccgacacctggctcaagccggcatgccggatcaggccttcatcgatgaattcgcggatggcgccgaactgctcggcgcgcgggaccttcgggtcgatgcggtggagctgccacaagtcgatctgttccagcttcaggcgccgcaggctcatgtaaacgcactggcgcagataggccgggtcgccgatcaccggccaggacgggttggtcgagttgccggggtagcgcacgagactgcccttggtcgcgatcttgatcccgccgtagggatgcagtgcgtcggcgatgagctgttcgctgacgaacggcccgtagctgtcggcggtgtcgatcagatcgacgccgatctccggcaagcgcttcaggacgcggatcgcctcgtcgtggtcttccggttcgccccacacgtcggggccggtgatgcgcatcgcgccgaaacccaggcggttgaccgtcaggtcgccgccgatggcaaactggccggaaaggctggcatcaagtttcatcttggtactcccgtaggttgttctctgtgcaagaacagagaaaccgcagcggtcgctgcttgacgcatcgagtgtggcaagaatcggcccgggcgactagctgatgaatgcttaaagcgcctagtaggatagctaatcaatcggcgtgcgagccacgacccagcgccgcttgcaggaaaacgacaaaggcccgcaccttggcgggcacatggctgcggctgggatagaccgcccaggcggtcgtcggcgaatgggctgtgcgcacgacgtgaccgggaaacagtgcctccagcgcgccgctggccaggtcgtccccgatcacccagtcggccagcagcgtggggccgagccccgaaagtgcgccgtcgcgcagcatcagcgcattggtggacaccaggcgcggccgcacgtgcacctcgatctcggcgcccccatcggcgggcgcgaacagccagcggtcccggaacccggccaatgcgaagctcaggcaccggatggcctgcaaatcctgcggctcacgcagcggcgcggtctgcgcccgcacccacgcggggctggcggcgacgtggtagcggatcggcatcagcggcacggcgatcaggctggaatcgcgcaggttgcccagtcggatggcgacgtccacgcgctcggacaccaggtccaccggcgattccgtcagcaacaggtccagctcgatcgccggatgtgcctcgtagaaggccggcagcaagggcgagaggtggcgcatggcgaaggcattggagaccgtgacgcgcagccgcccgcgcacttcgccggtggtgtccaccgcggcgtcccgtgcctgggacagctcctccagcagcagcggcagccgttccgtgaacacggagcccgcctcggtcagcgccaagtgccgggtgttgcgggcgaacaggcgcgtgcccagctcggcctccagcgcggcgacggcacgcgagaccgacgagggatcgacgttttgctcgcgggccgccgcggcaaagctgccgaggtggacgacctgcatcagggtttcgaggtctctgatattcattcatgcaaatattacattagtaaaatgcaatacgcccggtcgattaatgcgatgaatgcttatatgttcgctgcgctgcattggcttgcccgtgcatccacagttccgcgctggaagatttcgtcgcagggtcgatgaagatcgggtacttctgacgcgcatacgttcgaccttcactaaggagcctgtttcatggctgacacgtcatccatgccgtccatcgtcggcttgttggagcccacaaccttcggggccattcctctgaacaatcgagtggtcatggcgccaatgacccgcctgcgggcgcaggccgatggtgcgccgggcgacctgatggtggagtactaccgtcaaagggccggcatggggttgatcgtgaccgaggggacgtaccccagcctggagtcccagacgggtgtgggccagcctgggatcgccacggaagagcaggctggcggctggcggaagatgaccgatgccgtgcatctggcgggaggccacatcgtgcttcagatcatgcacggtggccgaaccgcacatccgggcgtcaacggtggtcgccgcgtcatcgcgcccagcgccgtgacgctcggcggtgaggtgtacacggcgaatgggaaagaagccttcacgacgcccgcccccatggcggaagccgacatccgggacgtgatcgcggagcatgtcgccgccgcgcagcgtgccgtcgccgccgggttcgatggcgtggaaatacatggcgcgaacggctacctggggcaacagttcctgtcgccggcgtcgaaccagcggactgaccagtatggtggctccccggagaaccgcgcccgcttcgtggtggaactggtccaggcggttgccgaggcggtcggcccgggtcgagtgggactgaggatctcccctgagcacaactatcaggagaccttcgagcccgaccgcagcgacgtacttgccacctacggggcactgctggacgccttgcgcccgctcggcctggcgtatctgtccgtgttgcaccaagagccgactggagccctggtggaagagcttgcccgccgttttgcaggcaaggtcgccgccaacagcggattcgcgaccttcacctcgctcgaagaggctgaacagatcgtcgcggcaccgttcatcgatgcggtcgtcgtaggccgggccgcactcgccaatcccgatctcatcgagcgatggaaaagcgagcagcccctgaccgaacctcgatacgaccttttctatacgcacgacgcggcgggctacaccgactacccgactttggccgggcgctgaaagcaggaaaaccggagcgcgcccgcggctggcattccattcatgcggattccgcacgtctaaattgcaagagggccggtgtattgatgcggaaattggctctatcgtggaggtatcaacctcttctaggagccttccatgctgatttccatcgtctatgacagcggctacggccataccgaaagacaagcccgcgccgtggccgaaggcgtcgccaaggtgcccggcgcgcaggccaaactgatcaccgtgggccagggcgagatggactggagcgcgctggaagccagcgacgccatcgtcttcggctcgcccacctacaacggctcgctcagcgccaagctcaagcagttcttcgaggactccaccaaggccgcgtggagcgagcagaagtggcgcaacaagatcgccgcgggctttaccaactccggcgcgcagcacggtgacaagctcaatacgctgatcggcatggcgctgttcgccgcgcagcacggcatgatctgggtcggcctggacctgatgcccggcaacagcagcagcacgggcagcgtcgaagacctgaaccggcacggtgcctggctgggtgcgatggcgcagtccaacatggatgaaggcccggacgtgtcgccgcccgccagcgatctcaagaccgccgcctacctcggccagcgcgtggccgaaaccacccaacgcttcgcgcgcggcgcgagcgcctgaaccgggagaacgccatgaacgcctccggctacgccgcctattcgcccaccgagccgctgcggcccttcagcttcgagcggcgcgccccgcgccccgatgacgtcgcgatcgagatcctgtactgcggcgtctgccacaccgatctgcacttcgcgcggggccacaagggcggaaccttcccgctggtgcccggccacgagatcgtcggccgcgtgaccggcgtcggcagcgaggtcacccgcgtccaggtcgggcaggtcgtcggcgtcggctgcatggtggattcctgcggccactgcgcggcgtgcgatggcggccacgagcagcattgcctgcaggggatgacgcccacctacaacggcaccgaccggcatgacggcagcaccacctacggcggctattcggaccgcatcgtggtgcccgagcatttcgtgctgaacgtccccgaccagctcgacctggccggcgtggcgccgctgctgtgtgctggcatcaccacctggtcgccgctgcgccgctggaaggtaggcccgggtagccgcgtggccgtcgtcggtctgggcggattgggccacatggcgctgaagctggcgaaggccatgggcgccgaggtgacgctgttctcgcgctcgccgggcaaggaagccgatgcgcgccgcctgggcgcggaccacgtggtgatctccaccgacgccgagcagatggccgcgatcaagggcaagtacgacctgatcgtggacacggtgccctacgaccacgacctgaatccctacgtgcccacgctgtccttccacggcacgctggtgctggtcggctacatgggaccgctggacgacaagctcaacacgctgccggtcgtgttcggcggccgagcggtcgccggttccttcatcggcggcatccccgagacgcaggcgatgctggatttctgcggcgagcacggcatcgtgtccgatgtcgagctgatccgcatgcaggagatcgaggacgcctacgagcgcatgctcaggagcgacgtgaagtaccgcttcgtcatcgacatggcttcgctgaaggcttgaagcaccggcctggaacctcccagggagacgtgaaatgaagcccatgctcatcgccttgaccctccaggcgcttctactcgccggcgcggctcctaccgcgctggcgcaggcagcgccggatgccgtgcgcatccagaacaccacgccgcgcgactggtcgatgcaggtggtgagcagcgacctcgactatccctgggacatcgcccgcgatggcgaccggctcctgctgaccgagaaggccggccacgtcgtcgtcatcgagggtggccgccagcagcgctatccgctccagacttcggacgccatcgccagcgaaggcggcgcggggctgctcggcatggcgctgtcgcgcgacttcgcgcaaagcggcatcgcctacctctaccactcctaccgtgccggcgacggccttgccaacaaggtcatccaggcgaggttcgacggcaaggcctggtgcgagacccgcgtgctggtgtccggcattccgggccaccggctctacaacggcggcagcatcgccattggcccggacgggcacctgtacgccaccaccggctggaccgcgaaccgcgagcggccgcaggacgtgggcagcctggcgggaaaggtcctgcgcatgacgctggacggccaggcgccgaaggacaacccgttccccggctcgctcgtctattccctgggccatcgcaacccgcagggcctggcctggaacccggccggccagttgttcgtggtcgagcacggcgagttcggccacgacgagatcaaccggatcaggccaggcgcgaactatggctggccgctggcccagggcgccgagcggcgcgagggcatggagccggcctggatcgaatccggccgcagcacgtgggcaccggccggtgccgctttcgcgggcgacgagctgcttgttgcggcgttcggcgcgcgtgcgctgctggtggtggacgaacgcgccaaggcgctcaagccgatcttcgacgcgggcgaccgcatccgggacgtgctgcccgccgggcgcgacctgtacgtgatcaccacgaatcggtcgccccgagcggaagggccgtccaaggatcggctgctgaagctgacgctcgcccggtagttcccgcgagcaagctgcaccaagacctcggaatcgaatcgctgaaacagggtgtccatgccaagggacgccctcacttgggagaatcaatcatgtggaatcaagaccagctcgaccgcatcgtggcggcggacgacttgcggatttcgccgttccgcgaggacggcaagacctatggcaccccgacgtggatctggtgcgtgcaggtggacggcgacctgtacgtgcgtggctacagcggcacggcttcgcgctggtatcaggcggcggtgaagcagcgcgccggccgcatcacggccgcgggttcgaccttcaacgtgactttcgagccggtgtcgggcgcgatcaacgacgccatcgacgcggcctacaaggcgaagtattcgagtagccagtatctgcgcccgatgatcagcgagcgtgcgcgcgccgcgacggtgaagatcgtcccggcgagtggcccgacagcttagctctcactttccgaggttagctggctgcaggcaggccgagacgtcggcgcaactccggcgcggtcaggtgggcgcggaaacccggcccgccaggctggaacgaagcggccgccgccaggttgccgacgatgaccggatcgcatccggcatcgcgcaccaggccctcggcgaccttcatcgcttccgcatcgtcgctggccagcggcatcccgatgcgcccgccacgccgtgaggctgaggtctccaccacggtggcatcgacggcgctgaatgcacgcaccaggcgcgcgccgggcatgtacttcacgacggtctgggcgacgcccagctcgcgtgcctcgcggtacacgtcggcgctgctcgctccccagggattggtggagtccagcacgatcttgccgcggtaggcgctgcgcagatcgcgcccgacctggggcaatgcctcgaagggtacggccagcagcagcacagtgccgaactctgtggccgccagcggctggcccaccgaggcacgcggctccagttcgcgcgccatggcctccagcttgtcggggttgcgcgaggagaacatcacctcgtgcccggccttcacccacaggcggcccacggtgccgcccagcgagccggcgccgatcacgccgatgcgcatcggcgcggccgcgaacgcgcggctcgccggcaggagccacggcatggcggccagcaggcccatggatttcagaacggatcggcgggaaggcttcatggtcgtgtcctcagtggatggatggcgcggtggcggcgtcctgccgctcctgcgcctggtgggtgcgccccagccagacgctcaggcccagccagacggccgacagcggcaccgcgatcatgggaatctgcgcgagggtcaggcccaggcccatcaggcccgcatagccccaactggcgatctggtcgccgccccggtacaccacggtgtcgatgaagttcttggccttgtagcggtcttctcgggcgctggaggtgaacaggatttcgcgggcaggccgggccagtgcgaagttagccacgcgccgggccacctgcgcggccacgatgacggcgacgctggggctggcggccagggccgcgaagcccagcaggctcaccaggggcagcacgcacagggtcgccacgatgcccacggtcgccatcatccggcccgtgacgaagagctggaacaccagcgtcaccgcgttgacgatgaggtcgatgttggcgaagaacgccgtgcgggccgcccggtcggggaacgaggcctgcgcgatgctggcctgctggaagtacaggaaggtcgaggtgaccgagtacagcaggatgaagatcgccagcccgcccaggtagggcgagcgcagcgtgtggaccatgcccgcgaagatgccgcctcccagcggctgatccgggttgtcgcggcgcgcggcgtgctggaacgccggcgcgatgcgcgacagccggcgcgaggcgagcactgccagttccaggaacacgatggcgatcgccatcagccaggagcggtccaggtgctcgatcaggccggacgtgatggccgagcccagcaggccgcccgccgtggcgccggcagcgaacagtccgaacagtcgcttgccctgctcactgtcgaagagatccaccatgaaggaccagaacaccgacacgacgaacaggttgaagaccgagacccagatgaagaaggcccggcccacccacacctgccactgcggatcggcgaagtgcagcagcagcgcgaacagcaccaggttcgctgcaaagaagcggtaggctaaggcgatgaactgccggcgcggcaggctgcgcaccgccagcgcgaacaaggggctggccaccagcatcgccagcagcgtgccggtgaacagccacggcaggttctgcacgccaccagccacgcccagctcgtcgcggatcgggcgcagcacgtagtacgccaggaacagcgcgacgacgtagagcatcgaccacaggacggccggcgcttcctccgggcgcacgcccgccaagcgctgcaacaggggctgtcgggacggtgaagtcggtgcggcgcccggcaattactgctccttggcgccagcggcgagctggggcgcgttggctgcaccgttcgtccaccacgccacgaaggtctgcgcgcgaccgtccaggtggacggggcggccgatctccggcgtccacagcgcgtagctgcggccctggcttgccgccgtgatgcgcttgaacgggtcatcccagtcgtgcggagagatcgagaagcgcccggcgtgcgcgggcgtgagcaccttcgcgtgcagttcctcggccgcctgcgcggcctgctcggggttcatgtggacgttggcccagcgcgggtcgtactggcccatgtcgagcgccacccagtcgaaggggccgaggcgctgcccgatctcggcgaagtgcggcccgtagcccgtgtcgccgctgaagaacagccgccgctcgggcgtgaccagggtcagccccatccacagcgacttgttcttggtgaaggtgcgccccgagaaatgccgcgccggcgtggcggtgagttgcagcgtgggcgacagggcgaggccgtcgtaccaatcgacctcctgcacgcgctgcatgtcgtagccccagcgctcgaaatgcgcgcccacgcccagcggcaccatgaccttgccgaccttctgttgcagcgcctggatgctcgggtagtccaggtggtcgtagtggtcgtgggtgatgaccagaaggtcgatcgcgggcacgtcggcggcggtgtagaggctggtgccgtcgaaagccacgttcgtgcccggcacgggggacgcattgacgctgaacaccgggtcaatcagcaggcgctgcccgcccagttgcacgtagtaggacgagtggcccagccagaccaccacgtcgtcgctcgcatccagcgccttcaggtcggtcttggtcgccggcagcggcatcggcgggcgcgtggtgcccttgttgcgcatgttgtccagcatgatcgacacctgcgtctggtcggtcgtcagcagcggggtgtcggtctggttgtggaaggcgccatcggcgtagttgggcgagcgctcgatgcgcgcctggcgctcgccgctgggcagctcgccgaacaggggatgctgcaggtaggcggccacgccgacgccgcccaggacggcgacgccgacacccaccttgatgacgcgggaccagagttttttcatgcttatgtaccttgtgcgggtgtcacgcgaatcagggcgccgttcggtgcgtcggtcagcaccatgaccgcgccgtcccgggcgacatcgacatcccggatgcggccctggccttgcaggtagcgggcctcgcccgtgacgcgcccgccctccagggtcagccgcaccagcgcctggccggccaggccgccgatcagcagatcaccccgccatccgggaaacagcgcgccctggtagaacgccatgccgctgggcgcgatcaccgggtcccagtagtagatcggctgctccatgccgctgcgtgccgtcaggccgtcgccgatggcgcggccgctgtagtcgaggccgtaggtgatgaccggccagccgtagttccgcccggcttgtggctggttcaactcgtcgccgccccgcgcgccgtgctcgaccgtccagagcttgccgtccggcgccagtgcggccgactgcacattgcgatgcccgtaggaccagacttcgggctggccgcccggaatcgccggattgcccgcagcagcgccgccttgcggatcgatgcgcagcaccttgccgatgtgcgtgcccgggtcctgcgccagcgtgcgcgcctcgtagcgatccccggtcgtcacgaacagcatgccggcgtggtcgaaaaccaggcgcgaaccgaagtgggccgaggaattcctggccgggttctgccggaagatcaccttgatttgggtgatcctgcgatcgtcccccgacagcacgcccgttgccacggcggttgcgttggcgccgccctcgcgcggctcggcatagctccaccacagacggcgcgtccgcgcaaagtcgtcgcgcaccaccacgtcgcgcagcccgccctggccccgggcgtccacggccggcaggccggcgatcggctcggacaccttgccgtcggcggtgatcagccgcagccggcccgggcgctcggtcacgagccagcggccatcgggcaactgggccatgccccagggatgctccaggccgtcggcgacgagctgcgaattcagccgcacgttcgcatcgagaaccggcgcacgggtctggccttcaaaggcggggcgctggtccggggcattcggcgcgcgggtgttgaagtcctgcgcctgcgcagcccctgcggcacaggccagcagcgcgatggccgccacaagatgccctgtcagggcggaacgtcgtgcttgcttcttcatgggcacctctcatcaggttcggacatggcctgccgctaggggcatggctgttctgcgggtggtcacgcccccgccagcttggtgcccgtggcgcgtgcgagttcggccagcagcaggtcctggaaccgggtgtcgttgacggcggagtgcggttcctggcgccgctggtgatgccagaagccgccgctggtcagcgcctgggggtcgtcgctggtcgccagccactcctgcgtcaggtgccccaggcgcaggtcgtccggcgccccggcgccgcccatcttggtcggcacccagccgggatcgaccgcgttgctgtacacctcgggccacagccgggcgaccgcggcggccagcgtggtgacgaacagcttgctatccgagtagctgccggtggccgtgcggcctgtccagtccatgcccgacaggctggcgcgcccgcccttgtgcatgctgctgctcaggtagatcaggcgctgcgggcgctggatcagggccgtgagcaagtagggggcgacgacgttgaccaccagcacctggttgccggagaggatgccggcgttgtggatgacggcatccattcggccgaggtcgttgacctggcgcgcgaggtcgcgcacctgcgcgaggtccgacaggtcgccgaccgtggcggtcgcgccctggtccacgagttccttcacggcggacatgcgtgcctgggagcggacatgcacgacgacctcatggccctgagacagcagcgtcttggccgcggcatggcccagcccgtcggccgagccggtgatgaacacgcgagccttgcggcccgcgccacgttgcacgttgggcatgggggtctcctttcgggcgggtgtctgcgcccaggacggcgtggcggccagcagcgatccagcgatcagggctgatcccagctcggcgccggtggcgaggaatcttcgacggtccatgggcatgttctcaggtcaggccgccgggccgtgcgcggcctccagcggcgtgctgcggtggcagcgaatcattgggatcgaacgggcggcaggcccttgctgaacaccttggcgtggaacaccgtcgcgccctggccgccatcgccgtcgttggcgacggcatagaggtcgttgcggttcgggtcgatcgctaggctggtcgaggccaggttgtggccgctgtcgcgttcgggcagcagcacctggccgatcgggatgccgttgcggttgaacgccagcacgcggccctggccgtagagcgccacgtacacgttgccgtcggcgtccacccgcatcgagtccggcgccgggccgataaagcggtaggcaatggccgagccgatcggcgcgatggtggtcgcgtcggacagttggacgcggtgcagcaggttgcggccgaactcggtggcccacagcgacttgccgtcggggctcagcgcaatgccgttggcctgtgccagatggggcaccacgggcttgatcgtctggaagtccggcgaggcgtagtacacgccgcccttgggctcggtggacgtgcccttgaagtcggtgaagtagaagccgcccgcggcgtcgaacaccaggtcgttgggcgcgtacccggccacgaccgggatgatcgtctgcaggcccgagccgtccaggttcacggccaggatggcgccgctgtcgaacgtgccggtcaacgccgcgatgaacaggcgcccatctttgtggatagccagcccgcccgggaacagtccgttcaggtgaacgacggtggacaactgcttgtccggcgtcagccgcagcacgcggccgccgctcacgtcgcagaacagcaggttgccgctgcggtcgaagatcgcgccttcgaggatcatgcggtccttggagaccttgaaccaggggtcggccacggtggactgcaaggcgcgctcggacggcggaatcggcaccacgctttgcgtctgcgcgtcgtaggccaggcctgcggcggcgggctgctgggccgcggcgccgagggcgaagctcgcgccgaccacgaggcatgtgacgccggcgaaggcgcgggccttggccgcgagcaggcggccgatgttctggttctgtggctgcatggaatggctcctttgggtcagcgttggcggctcacttcagatggcggtcgaagaaccgggcgagttcctggaagtgggtccgggtctccggggcgttcgcgtccatgtggtactgggcgtgcgacagcccctcgaacacgatcaggtcggccggcacgccggcctcgcgcagcttcaggtgcatgcgcgcggtattgctcaggaacagatcccgcgtgcccgtggtcagcagcgtcggcggaaagtcgcgcacgtcgccgtacacgggcgagagcatcgggtccttcaggtcgtgcccggccgcgtacaacctggccgcatcccccagccagccgtcgtagctcaccaggatgttgtccacgccttcgttggtgaaatagctgtcgccggtcttggtcaggtcggtccatggcgtgcccggcgcgatcgcggccggcagcggcaggccttcggccctggcgcgcagcaccagggccagtgtcatgccacccccggtggaggtgccgaacacgccgatgttctgcgcgggcgtggtcttgagcagttcccggtacaccgcgagcgcgtcgtccatcgccgccagatacggatgatcgggcggcatccggtagttgaccgagacgatcctgtagccgccgatcccggccatgaagatggcctccagcgtgcccgattcgcccgcgcccaggacgtagccgccaccatgcaggtgcagcagcacccggtcaccgtgggcggccggaagttccttgggggcgagcgtgaacaccggcacgccggccatcctgccggcggtcgaggtgacgcccagcttctcccgcagccgcggcagcagcttctcgacgccggcgtcgaagttgccggcccaggtcttccacgcctgcgcatccttcgggtggtcattccacatcggaggcggcggcgcggcgatcagcgcctgcagctcggggctgaccgtcttgggtaccgacagcaccgcgggccgctgctgggcgtgggcgagcgacaccgccaggcaggcggcgccggccagtcccagcgcgagcctgcggctcgcgatgcggggaagcattcgcgtcacaggcatgcgatcaccagggctggttcgccgggccgaccgtgaactcgttgaccgtcgtgtcctcgggctggtcgatggcgaaggcgacgatgctggcgatgcggtcgggcgagatgccgtacttgtcgtaggtgctctccatctgctcgcgcgaagtcttgtcgctgatggtggtcagcagctcggtgttgatggcggccgggtagatcgtcgcggtgcggatgttggtgccttccatcgccgattccatgcgcagcacttccatgaagtcgcgcacgaaccacttggtgccgccatacacggcgccgcctgggtaggccttcaggccggccaccgacgaggtggtgatgacgtggcccgacttctgcgcggtgaaggccggcagcacggcggcaacgccgttgagcacgcccttgacgttgacatcgaccatctggtgccagtcgtcggtcttgagcgccgacagcggcgagttgggcatcaggccggcgttgaggaagatgacatccacgcggccgaaggtgtcctgggccagcttgacgatgcggtcgttgtcctcctgcctggtgacgtccagcgcctgataggccacctggccgccgctttgcttgatctcgtcggcgatgcgcttgaggttgtcggtgcgccgtgcgccgagcacgaccttggcgccctggctggcgagcagcttggcggtcgcttcgccgatgccggacgatgcgccggtgatgatgacgactttgtctttgatcatgatgttgtcctctttcgttgggtgttgagaattacttgaggctggattggaagaagttcgccagcttgtcgaaggggatgagatccacccggtcgtacaggtccacgtggcccgctcccttgacccagtacagttccttgggctcgccggcgagcttgtaggcctgttcgctgaagccacgcgagatggcctggtcgccggcgatgaaaagcatgggacgtggtgagatcgtctcgatgtcgttgaacgggtagaagttcaggaacttcacgtcgctcgccagcgtcgggtgcgtggtcgtttcccgcgtggcgcccgcgggcgtgtactcgccgcgcggcgtgcggtagaagtcatagaactcgcgctgcatcgggggcgtgtcgtcgtgcagcgcatgcacggtgccgccggtgtattcgaccttcccgccatcgaactcggcctggcgctgtgccgcagcggccgcggtgatctgcttgcgctgctcgacggacaccatgcctcttgccgctgaacccatatcgaccatgctgaccgttgcgatggccttcatgcgcgggtcgagcttggctgcgctgatgacgaatccgccaccggcgcaaatgcccagcacgccgatgcgctcccgatcaacgaatggctgggtgctcaggaagtccaccgccgcgctgaaatcgtcggcatacacatccgggagcacggcgttgcgcggctggccctcgctctctccccagtacgacaggtcgaaagtcagcgtgacgaagcctcgctcggccagcttctgagcatagaggttcgcgctctgctccttgacggcacccatcgggtgccccacagcgatggccgcgtgcttctggctccggttcaggtcgttgggaacgaacacgttgcccacgaccttcatcttgtactggttgtcgaaggtgaccttctgtacggtcaccttgtcgctcttgtagaagttgtctgcaccgttggacatatcagctcctattgctgaaaacgacatcaggaaaaagcaaagcaacagaatcggctttctcattggggcgctccttccgttctgacctgaggggtggatggcatctgcttgcgcgaggctgtttcgatcacgccgccaaggaggcgttgtcgatgacgaagcggtacttcacgtcgcccttgagcatgcgctcataggcgtcgttgatttcctctgcgcggatcagctcgatgtccgcgacgatgttgtgctccgcgcagaagtccagcatctcctgcgtctcggggatgccgccgattgccgaaccggccaggctgcggcgcttgaggatgaagttgaagacttccggcgaggggtgcggcgacgccggggcgccgaccggcgtcatcgtgccgtcgcgcttgagcagcgtcatgaaggcgttgaggtcgtgcggcgcggccaccgtgttcaggatgaagtcgaagctctggccgtgggcggccatctcgccaggattgcgcgagaccaccacctcgtcggcacccagggccatggcggcgtcgcgcttggattccgaggtggtgaacgcgaccacgtgcgcgcccatggcgtgcgccagcttgatgcccatgtggcccaggccgccgatgccgaccacgccgaccttcttgcccggcccggcgttccagtggcgcagcggcgagtaggtggtgatgcccgcgcacagcagcggcgcgacagcggccagttgtgattcgtcgtggcggatgcgcagcacgtagcgctcatgcaccacgatctgctgggagtagccgcccagcgtgtggccgggtgcgtccggcgtcgggccgttgtaggtgccgaccatctcgtcgcagtagttctccagcccctcggcgcagtcgtcgcagtgcttgcagctatcgacgatgcagccgatgccgaccagatcgcccggttggaagcccgagacgtgcgcacccaccgccgagacgcggccgacgatttcgtggcccggcacgcaggggaattgcgtgcccgcccattcggcacgcacctggtgcaggtcggagtggcacacgccgcagtaggcaatgtcgatctgcacgtcgtgcgcgcccggcgcgcggcgggtaatgtccagcgattcgagaggcttgtcggcggcataggcgccgtaggctttgacggtcatgtgcgttctccagtggatggctatcggtaggcggcgggccggtcgccgtcggtgtggggctggctgatgcccaggtcctcgttgacgtggcgcccggggtgcttgaccagatcggcgatgaatcgccccaggctggcgcgcgaggtctccgtgcccttgaaggtctcgcccttgcgggtcagctcgacctcttcggtgggcttgttggtcagccagacggggcgcagcagggtgtagtccagcgagggcttctcgatcacctcggcggtcttgcggttggtcggccgggtgtagcccaccatgtccttgtcccaggcgttgaacggctcgggcagctcgtcgtagatgccgcccgcgctgatggcgatgatgcggcgaacgcccagttcttccatcacctggacgacgccctcggtgaggttgcccaggtccatgccgcccatggcgttgatcaccacgtcctggccccggatggcggccttgaggtcatcgaggttgcgggcatcgccctcgaccacatggacgcgctcgccgtggaagccgctcaggcgcttggcgttgcgcgcgaacagggtcagttccacgtcgtcctgctccagcaggcgggtgatgatttcgcgggcggtgtggccggtggcgcccagcacaatgactttcttcatgaggtctgccctccgttgaccttgtagcgcgcccagatcgtgccgccctccaggggcttggcctcgatcagggtgaaggagcgcggctgcacccgggtgagcggctccttggccgtgaacaggctcggagcgtccggcgccatgagcaggctcagttcgtccaccagaccgtcctgcaggtacgaccagttcagcacgccgccgccgccgatcatcacgcgctccatgccgaacagcgtggcgagcttgtgcagggccagggcgttgtccagccgatccttgccggccacgatgtaggagatgcccaggcggcgcagcaggtccttgtaggcgttgctcgcctgctcggtgagaaccgagatcacatgcgactggcggctgccgtaatcgacgacgttctcctgccatcccaggcggccgctggcgtcgatcgccacgtagtacatcgacgcatgggcgtcggcgacgaaatcaccctcgggcaccggagccgctgcctcgttcacctgcggggtgcggtagtgcgtggtgttgtcgtcggtggtgacgcggccattgatgtcgccctggatgtcgaacacctgctggtcggcatgcagcaccagttgctcgtactggagcgcggcgagatcgaactcgggaaggtcgatcgcgtggatcttgccgtccagcgacgtcagcgtgtggatgatgacgtggggtttcttcatgccttcctcggaagattggtcagccgtgcgacgcggactggcgcgcggtcacgacggtcagcacggcgcagatcgccagcagcacggcgctcgccacgaaggtggtgcggtagccgctgtggtcgaacagaatgccgcccacggtggagcccagcgcgatggacatctggaccacggcgacgaacaggccgccgccggcttcggcatccttggggaacaccttggcgatccaggcccaccagcccaccggcgccgacgtgccggtcaggccccacagcgcgagcagcacgaggacgatggcgacggagctgccgaaggcgatcagggccagggccgtcaaggccatcagtacggggatgacgatcatcgtctggtagaagctacgttgcagcacacggccgatgagcaccgtgccgatgaagccggccgcgcccagcacgagcaggaacagcgaaatcgtcgcgccatgcacgttcgtgacggtttcgaggaacgggcgcacataggtgaacaggccgaactgccccatgaacagcaggctgctggcgagcatgccgacgaccacgcccgggtgcttgaacagggtgaacaccttgaacacctggccgatgcccggcgcacgcgcggcggcgggcatggacggcagcgtcttccactgccaggccagcgcgatcagcgataccggcaccaggcacaggaaggcgccgcgccagccgatcacggtgctcaggtacgcgcccatcggcgcggccaccaccgtggcgagcgcattgccgccgttgacgatggcgagcgctcgcggcacgtcgcgcttgggcaccatgcggatcgccgtggcggccgacatggaccagaagccgccgacgaccacgccgatcagggcgcggcccagcatgtagatggcgtagttcggtgccagcgcgacgatggcacccgagacgcccatcgccagcgtcaggcccagcagcagcgtcttgcggttgaggctaccggccagcgccgagatgaataggctggtgagcacggcgaacgcgccggagatggcgatgccctggccggtcatgccttcggtgacctgcaggtcgcgggccatgggcgtcagcaggctgacgggcaggaactccgaggcgatcagcgcgaacgcgcagaccgacatggcgaacacgccgctccaggacgccacttgcgctggggcttcattcggggtttcggagtcgtcctgggggactgttgttacgttggcggtcatggagtgcttttcttctttggctcaataggaaacgccgcgccatccattggggcatgcgcggtcggggatgcaaaacgaggggcgcgcagcgcgcgccctggtggccggtggctttacgccgatgcggccaggtgcttctggaagaacgcggtcagcttgtcgaacgggatcttgtccatcttgtcgtacaggtccacgtggacggctccgggaacgatcaccagttccttcggctcggccgccgccgcgtaggcggtttcgctgaagtagcgcgaatgcgccttctcgccatggaccaggagcatcggccgcggcgaaatctcctggatgtaggtgaggatcggcatgttcatgaacggaaacggcgtcgtctgcgtccaggcgttgccggagtttacggcgcgcgggtggtagccgcgcgccgtcatgtagtagtcgtggtactcgaccaggaactgcgcctcgccacccttcagctcgttgtagggcggctggtaggcgggcttgccggcctcggcatccttccagcgctgctggctcagttgctccagcgtctgcgtgcgctgctccagggtcacgctgtcgttgtagcccttggacatgacgcgcgtcatgtcgtacatggtgctggcgacgaccgccttgatgcgcttgtccacggcggcggcgctcagcgccatgccaccccagccgcagatgccgatgatgccgatgcgctcgcggtccacattcggcagcaggcccaggcaatccaccgccgcgctgaagtcctcgacgctgatgtcgggcgaggcgacgttgcgcggctcgccgctgctctcgccggtgtaggacgggtcgaatgccagcgtgatgaaaccgcgctcggccatggtctgcgcgtacaggcccgaggattgttccttcaccgcgccgaacgggccgctgacggccagcgccgcgagcttgccgctggcattcttgggctggtacaggtcgccggccagggtgatgccgtagcggttcttgaaggtgatcttccgatggtccaccttgttgctcttggggaacaccttgtcccacttgtcggcgagcgccacggccggctgggcttgcgcctgcgccgggctggcggcgatggcgccgacgcccgcggcggcgatgccggtggcggtcattttgagcaaggtgcggcggcctacgtccaggctacccggcgcggcgatgtcgctcgtctcaatggtcttggtcatgatgggtattcctttcatgcaggccgctgtcgcggaggatggttcagggctcgacgcgctcgatgcgcatcttgtaggggccgggttgggacacgatggcgaggccatcgtcgatcttgcccagcggcagcaggctgcgcgaataggagcgcggcttgatgaagatcgccaggttgccccagggggcgtagtgggtcagctcgccggccacgggcgccacgccctcgggcgcgccctgcgtggacagcttgcgcggcaggtcggacacgcgctcgatggtgtcgtagtcggtcatcgtcagggacagcggcagcagcgacgcgaagtccttggcggtggcgttgtcgtacagggtggcggtggcgacctgctcaccgacgatcaggcgaatcttcatgctggggtccttcgagggcgaacgggaggcgccggccggcgtctgggcgaccgaactgccgggggcgcaggctgccaacccgacgaacgagccgaccagcagcgcgagcacgccgcgtcgccaaggggaggttggggttgactttttcatgcctcgtatcttccctgttgcgaggcgctttgactagctaatgaatacttaaaagccctataaggtatgctaatcagtaattctttaaatacgtgggagactgggcgccatggccagacgcaacctcaacgaccttctgtacttcgtgaccatcgcgcgcgaaggcagcttcacgcgcgcggcggcccacctgggcgtgacgcaatcggcattgagccaggccatcaacggcctggaggcccggctgcagatccgcctgctgacccgcaccacgcgcagcgtttcgccgacggcggcgggcgagcgcctgctgaacgccatcgggcatcgcttcgatgagatcgagtccgagctggacgaactgaccgagctgcgggacaagcccgcggggacggtgcgcatcacctgcggcgaccacatcctgcggaccacgatcctgcccaagctcaccccgctgctgcgcgagtatcccgacatcaacatcgagttcgacgtgaactacggcttccgggacatcgtggccgaccgcttcgacgcgggcgtgcggatgggcgacaccatcgacaaggacatgatcgcggtgcccatcgggccaccgctgcgcatggcgattgctgcctcgcccgagtacttcgcatcgcaccctgtccccaagaagccgcacgatctgttgaaccacaactgcatcaacatgcgcatgcagaccagcggcggcatctacgtgtgggacttcatgcgcagaggcaagcagttgaacgtgcgcgtggatgggcaactgatcttcaatacgacgccgaacatggtggacgccgcactcgtggggctgggcattgccgcgctgcccgaagaggagttcgcgccgcacatcgaggaaggccgcctgatgcgtgtgctggaggactggtgcgagccgttctcggggtatttcctgtactaccccagccgccggcaaccgtcgccggcgttctcgctggtggtcgatgcgctgcgctacagcgagggtcgtccgagcaaggagccgatcggcaccccccaagaagaaggccgagccgcggaagaaagcagccgcgaaatgagctggtagcggttgcagcgcgcaccggcaatgtggcgctgcgttttttgtcacttctcttgcaccagtgccagataggggttgttcggcggcgtgtaggcgaacagcaggcgcgcatcgtccagcaggtagccgtggaggcggcgggatttgcgaggccccgtcacctcgcaggtccagatgttcaggccattgggatgcttgcgatggtgttgcagccgctcgaaacgcttctgtacccattgccagtcctgctggctttcctgcttcgccagcgtgccgacttgcgggtgctcctgcgcgtaacgctggaagacgccggggctgaccaggtaggcggtgccgcccacggtatgcacgagcgccttggcgtcgttgatgatgagccgccgcgaggcgacgccctgttgcagccatgccatgaagtgctcgcccgatggctgcgtggccatgggtgctgatgacggaggcagagggttggccggcggcggtgcaggagttccggggactgcggcaggcgcttcgaccgagacggcttctgcatcctgccggatgctaggcaaatcacccattcccaccatcgcgagcatgtcttccatgacatcaggcacggcctgggcagcggacgggtgaaccggggcagcggcgccgccagcatccgtccatggagcggactgctgctcttcggcagaaggcgttgtcgcgattgccgccgattgcaccgaggcatcggcatctttgtcggcgggtgtcgtgtcgatcgccaccgtcccggcgaacggcgccggccgctcgccaggctcccaaatcagcgctggtgccagccgcaacagggtgaacgagtgggaccagccggtcgaactggtcacggtcgcgcgccagatcgccttgccgtcggccgtcggctgcaacatgccgtggtcctggagcacattgaacaccgcggtgttgttcgcagggatgccatcgacgccctgggacagcaggtgcgcgcggagcttgtcggaaacggtcttgctcaccagccatagcgcatcgtccgtgagccagccatcggaggcttcgggctggttcagtttcagctcttccttgagcaggtagcgcagcccgttgaccagcttgcgttggagcgagtgcttgggtgcggccatggcgcgcgcgggatcgccgcccagctcctgggcgacggaggcgcggtcggcctgcacgaccagttcgcccagcaccccggcgtgctcgtactgtccggccaggacgtagagcagcggcgcccacagggacggatagccgctgagccagtccagcagatcgcggtcgagcagttgccggtagagcaagcctgtcgcggcgctgtggagccggtactcgcgatcgtcgcggtagcggaagcggtacggctgacgcagcgggccgtgccacgggtgccaggtgctcccgtcggccagctcgacgtgcagatcgaccgccaccttgccgatgtcatggagcagcgcggcataggcgacggccgcagtccaggcttcggcctgcgccgcctggtcctcgggggtggcgccgatgggcagcagatgggactgccgcagcttcaggctgtaggcgacgatttcgaggccatggtcgagcatgccgcccgggtatgcgtggtggtgcgcttcggaggccgggaagacctggaccagctcggcgtatcgctccagtggcgcgcggtacagggtggcgaactgcctgcgcgagagcgaggtgtgctgccaaatgtgttccatcagcttctgccggcgcggggtggccagcagcgatgcggtcgactccggccgcatcagccctttcgggaggtcggtggcgggggctggcgacggcgtggcagcgaccgggggccgttttcgctggaacagggagagcatggcggtgtcctgatggcgggccgggcgggaggcctttttgccttttcgaggtagggcctttccccttgcaccccattcccttgccgtttcgaccctttggcctttaaccgtttcggtatagcggggcctgggctgcggctccagcgtcaatgtggaacccgcacgaatggattggacggcgacctggcgctggcccgggcctatgctgccgggacgctacaccgccgggtaggctcccactcgggcgactaagttgacaaatgcgacaaaggcgactagagtgaaacctgtctcaaacctacctgggagctgaccatgcccactgcgatcgaattcattgccgaccggctgccgcgcgtcacggtggaggatgtgcgacgcttcgccgataccgtcgaaatccgggatgccccggctttcgcggccgagttgcaggcgttcatccacgagcgcgtcgaggcggtgacgctacctgccaacctggaaggtgaaacggtggtgcaggccttgcagcgcaaggcggccgcgttgcgctccgacacgcgctgggcaccgaatgaaaccgatgtccagcgaggccgcgccgtgctgctggaagccttcaaccagccggacaacctgccgcctgccgagttcgccaagctggcggacaagtcgcgccagcaaatctacaaggacatcctcgcccgtcggctgctggcgctgaacgtggggccgcgcggccagaagctgcccgactggcagctcgacccggtgaagcagcagttgacccaaaccgtgctccaggaggtcgagggcatcgaccactggacgatctaccgcgcgctgtccgaacccctcgaaggcctgggtggtcgctcgccggtggatgcggtgacgcatggcacgatcgatgacgtggccgaggccgtgttcaacgtgctgggcgtccaggtgcattgaagcgagatcgccatgagccacgagctgccttcgttcctgatcgatgccggtgaactgctccagcatgtgagccgcgtctatcggggcagcccgctgtactatggccgcagcagcacgaatcgctacgatgacccagcgggggcctacggcgtgctctacctggggcgcgacctgcccacggcgctgatggagtcggtgtttcacaagcaccagtggcttgcggacacgcaacgctcgatcgcgctgaaagaagtccaagcccggatggtgcgcgcagtaggcgtgatggacgacgtgcttctggccgatctcacggcgccgggcgtcatggcgggctacttcggcctgaacctggagcagttggccagccgcgactacacgcacacgcagcgggtgtccgcccaggtgcatgcgatgctcggagatgacggccaggcgctgttcgacggggtgctctatccgtcgcgcaacaactatcccgccaagagcatcgccctgttcgagcgtgcgggagcgaaggttggcgtcatcgaggacatcgacctggtggaccatgtggactggccgcgtttcgttgctacctaccgcatcggcgttgaacccgaccccggcccggtggggccggatgacgaagcgtcctgaagcagcaagaaaacacattgaagccgcaaaccgaatgaagtggagcaaactggaataggcattcctcaacagcaggagacgaccatgaacacgacgacccgcaccagcaccgcagaacgcctcggccgcgcctttggccgcggatggcgtgcctatgcgcgcggcgaacggcgggcgtcgaactggttgatttccaagggagtgccggtagctggcgtaccagcatccacaggcggtcaagccggtgggcgcttcccttgggcagcaatgccagtgcgctggcgttggccttgtcgggcttgacgcagcggcggtcgaacagccacacgttggacagcgaaccgaatagcgttcgccggtaggcgcgggtcatgcgcttttccaagcgatcgacgttgctgacgaacaccgggacgctgccgccctggtcggtgatgacgtggaactggtccaggccctgttcgtcgcgaccgagggtcagacgagcgaggaactgctggacggcggtgtcgcgcgtccagatcgacaggaagatcagattgccctggtcatcgccgacgcaagcgtcggccatcacgtcggagcattcgtcgatgcgatacagcgtggtggaagaagtgtttgcgggcatggtggtgtcctcggatcaacgggaacagcaccgcccgctggggcaagtactgccccagggggtggaagaaaaccgctcagtccggctcgaactgccgggtgtgcgggttgaagtgcagcgcctcatctaccgaagtgattggcgtgaagccctccaggtggatgttgttgaggtattggtcgcgataggtcagtgcctgccgtgcctgttcctcggtgaggccgttgctgatgaagtactccagcatttcctcgtcggaagaaacttcgtcgttggacaaactcccttcaacgagcttcaacagcgcgggcgggagcgcagccaggatcgggtccatgtcggttcctcctggctcaggccatcagcgctgcggtgggtgccgcaggtgccgtgggtgtgcgccgccgcgcgtggtaggcgcgaacgcctgcacgccagtcggcggactgctccggtgcgaggtccagataggacagcgggcacgagtagtagtacgggtgcatggactcgtccagtggcttgtagccccactggttgccgctgcgttcgagcagatcgcaacggatgtagcgcagggattgacccggtgccagatgacgatgcacgccttcgaccttggccgtcaattccgcaacggaccacaggacgttgccgcgcagcgcgtgggcgatgaccttgacgctggcgcgctcggtctcttgcggtgcgatcagttccgcgatcagttcagaccgcgattggggggagaaataccagcccatgaaaggcctcctgaagaatcgagccggaggcctccccgtgggggagagcccccagcgggtgatggaatgccgcgcgtgcggcgatggagtccggtgcggactaggaaccgcaaccggctgggcagtagcccagttcgatgccatgggagcagtagccgtttgcagcgttccactcctgcgtttcctgccgttcggcaggtgttgcgtagtcccattcctgggtcgcgatttccagggcctgagcccgctggctttccggcaaccgactggcttgcgcgtcgatctccgaactgaaaagcgtgacccagtgatcccaggacaggccgcaaccacgctgggcgtgctcggcggccgtcttgcagacagcgcgccacgcgggttcgtccagcgtggaatgaggtgcatcgcaagcgatggtggacatgatggagacctccagaagaaagccggagcctcccccgcatggggaaggaaccccggcgggtggaagaagaacaccgcggatgcggcgtctgcgatcacgcaggttgcagttcggcctggcggctccactcctgcgtcttgaagtccagcgcgtagcccagttcacccaggcgggcgatctgcgcgcgcagggtgcggcggtcgatggtcgaatccagtttcacggactctcccagcggccagagcagcccgaacagcgcggcgtcgccatcttcagtgctgccggaggcagcagccgcagcgggcggcggggcatccacaccaaaaggcgtggtatcgatcagcgggtccgcggacgcctgcacggatgcgggcttggccggcgttgccgcaggctgcgcgcccagttcttcatcgagcggatcgacttcctgggtggtgaagctgcgtgcctcgtcacggctcagtttgtcgatgccgttgagcgtcatcccgtccaggttggcacggatctcgaaccgcatgccgtcgccgacgggataggacttcgggaagatgtagcggatgacgaactccccgtcgtacttgccttcggggtactgctccagctccgcatccttcaccgcgaacttgccgatgggtgtgacaagtcggcccacgttgaaagggccgtttcttccgcggatcgtgcgcagcgtgagttggcctgggacggtgatgggcgagcccgattgctcgggcgccgatgtgactgccatgatggttctccttggggaataggaaaaaggcaaggccccgtgaggggccatgccggatcagaacgaagcagccaatgccggctcctgctcctcgacttcacctgcgggctcgacaggctggtcggcagcggtttcggcggcaacctcggcttcgggcgcgtgtgcgtcctcggcttgcggcgcctcggcttgcgcctggctcgtcggatagacctgggtgccgtcgatcttgatgagaccgatgtggaccagcgtcgattccaggctcgctcccggttccccggcgcgctcgcccttggtgcggatgtacggatcgatcttcatgtcgttcagacggaaggcgatcagcaccttgcggtccccttcgatggcctgcacgcaccggcgaaccaggtgctcggcttcaggggtggcgacgatggtgtcgaagtaccgatattccggttcaccgacaggtccggccagcgccgcgacgcagcacgacaggaacggatcgccatccttgggggagacgtccttcggacggctgaggtagccgatgccgcgggtgatcagctcgtgctgcttgatcgaagccagttcggcccggtcaagcggctcggccttcagcagtcgcgccttcagagacgcggcggcctggcccttgtgctcacccttgtcgcggatgtacgcatcgccccagaggtcgccgaggcggaagcgcaccagcggccgctgcttgggatcgtcaacgccgatgtagcgctcgaccagtttcttggcctcggcacccgagaccttgacgtcgaagtagcggtagctggggtccttggcggaaccgaccagcgcggcgatggtgcatgccaggaagggctgcgcacggcggccgccccggacgggaacctcgcgggcacgctggatgtagccgatgcccgaggtgtggaggtcgaaatacgatttctcgttggacgtggtgctcatggtgaatctccatagggatgaagcggagacacaccggccccacgcatgcggggaaaggtgcgtaaccccgcggtgggttgataaggcgaaagcatccgccaccaggactggtggccgctcgcggatggatgcggtgcgagctggctcggtcacgcagtgggaactgcgcggcaacctcgaagaccgatggttgcctggcatgtcgctgacaacgtcagcaggcatgggggtagcatgtccgggcctcgcgcgcgcggcagcaatcaatcggcatccgggtgtttccctttgtctgcaccgcccggtgcttgccacaggcacttggggcctcgcaggtgctcgggggtgtcagcgcggggccggctggggcggctccatgcgccgccgccgcgcgtgccgaccagccgccaaccggcggcgcgcaggctggcacccccttcctcgggcagggtgtaggtgatcagccgcgtgtagcccagggctttggccgccttccaggccgcgccgtagagcttgctgcaggcgttcggtgcgccatcggtgcagagccgggtgacttcgagcgtccagccgttatccaggtggcgagcgaccgggcggccgacgatggccacgccgcagatgccatcggtggcggatagcgcgaccgccagggcgaacttcgctccctgaaccggacggtggtggcggtggtgctcctgcacgaaggcattggcgcagcgcagggacaccggcagtaggtgcagcgatggcgaggtcgatggcccggccatggccgtcaatcaccgcagaagcaggcgatcggctcctcggcggcgtcgaacaggtcgccttggtcggcggcgaagtgcgccagatcggcgtagctggggccatcggcgcggaaccgggcaccgctgggcttgcttgccaggttcagcgattccatgcgaacccaccacacggcggcctctggtcgggctttgatgagggccaggcgctgcccgcgcggtttcaggaaacacaggtcgcagttgccttcgagcgtgcgcccgttcaccgtcagcaggtcgaggtcgaacgcttgcgcctgccagaaggcgcccacgtcgcgcacggtgacgccggcatccgccagcggcatgcacatggtctcgcgggtcgattcggtggaatggccgcgcgcgcgaatcttggcgacgcggcgctgttcgtcggcgcggatgccgatcatctggtcccagtcagtccaccccagatgccgcaggtagcggtgcatcgggcgaatcttcaggctggtcgtgcagccgcgcgcgacgggattgggcaggtactggcgcttgcggatcagcgcctcgaacggctcgccctggcggctggcccgatcgaagtccacaagcgtgaagcctggctccatcggcaggtattccagccagcgtatcggcacctgccagtgctcggcgcagtcgcgcacgaagcgcagggtcgcttccacctccttgccggtgttggcgaagcagaccacggtgtcggcaggcaggccgccattgacctgcaacacgcgccagagcatgtaggcgctggtgcgcccgcccgagaagctgatgcaggtcggttgggtgatcttgaacgggtcgtgcatgcggtcgtctccgtgggtaggtcggcgggcgagccgacgcggcgggccatggcggccggagacgagcacgcacgcggcgaagggcgcagtgcggaaaaaggaagcccccaagaagggggccgtgaggggatggtggtagtcgttgcgctacaccgatggcaccacctccagcgacaggtgcgtcgcggtggcggacagcatcagatcgtccgtgccgtgcaggatgcgtgcgaagacgccttccttcgggtcgaagaactcgccgaagtcgtcgccacccagctcggcgcgcgccagttcccaccagtcgtcaaacgggtcggtatccgggttgcagccgacggcataggccagcagcttcacgcggccatcgggacggcgttctccctgctcggcgaggaaatacacgccctggtccttggcgaggacgacgcggcattggttggcaacggcctcggccagcacggggcgcaggtcggaacctttgaatcgcaatgacatggttgatctcctgaagaaaaaggccctccacccgaatggatggaaggcctatgggggcaagtcgccggtaggctgcgatcagccgtagcgtcgcttggttgccttggcgtcgatgacgctcacgtcgatcaggcgccagtgcccgtcgtcgataagccgctccagcacttcaccgagcatgtcgaaatacacctcgtcgtgccgatcgaccagttcgccgtcgcggcgcagctcgaccacgtaggtatcgccgccgcggtcgtagaggatcgtcacctggccctcgaacttcgcggtcgaaaccgtgaagctgatcgccggcggcgtctcgatgatcttggacggcttcggatcgacccaggtgaagtcgcgggcacccgcatcgaccagcatgtgggtgatgcgccggaacccgtcgggagccggcatttcctccaactgctggatgagctgtcccagttccatgcactgcggctcggggatgggcaacttggcaggcgcggagccgaggatgtgcctggtgatggtgtagggaacaccgtccgcggtcttctcggtgattacttccggggtgtccgcgcgcaggccgtcgaagcggcggcgggcatacggttggacatgcaccttggcgccttcgctggggacggtagtcaccaggttgggatcgagcaccgcgaactcgctgggcttgagcttgacgacgatggcgtcgtcgttggccgcgaccaccttgccgtcgaagggctgggggtcgatggcgaagcccagcgtcgaggactgcggctgatcatcgaacacgcgatacttgaacgaccgcacgttgcggggcacatggcctgcgacaagcgaaggcatcatggatttgatgagggaacggtccatgggaatctccttgaggaagaacaagggattccccgcccgcaagggagaggtcccttgtgggtggatggacgcggtgcgtccataggaagaaacgaccagcacggcttcccgtgcttgcagcctcgaaggtctcggctgcctgggcatgtgtcggcaacgccgacgaacatggggggcaggatgaccttgggacgggtggtatgtccgcagaaatccgcactgcgcggtccccgctttcattcgcgtcgcgcaataaaaacgccgcaggcggtagcactgcggcgtgttgggcggggactgggccagccagtcagccggtgctcgatggttccggtgcggcggtggactggagacgcagcgccatcgccgccgtgaccagcgcgatggcggccgcgagccacaagctggcacgcagccccgtcatgaagctgggtgcctgcaccagaagcgcaccgaacaccgccaccgccagcgcgccgccgacctgccggctcgtgttgaagaccccgctggccgtgcccgccagcgcgccaggcacgctggacagcagcacggccgccaccggcggcgcgacaaacgggccggacaggcccaccagcaccatcagggcggcgatccagcccaccggcgccgaggccggcagtgacgccacggccgccaggccgacggccatgctgagcaggccgctcacgatcatcgttcgcgcgccgaagcgatgggccagccgcgcactgaacggcgtcagcacgagcccgatcagcatcatcggcaagaacgcaatgcctgtcgcaggcgccgagaggccgcgatgctgctgcaggtacaggctcatgacgaacggcaggccgaagtagccgaccatgaaggtgaagcccactgccatggaaatccgggcattgcgcggcgccagcagtcccgggggcaccatcgggtgcgcgccgcagcgctgcgaccagacgaaggcggccagcgccgccagcgccaggacgaaggccgccagaaccggcgtcgcgcccagcccctgcgcgccggcctcgatggcgccatagatcagcgcgcccatggcgaggatggccgtgacctgcccgaccgcatcgaagggcgaggcgcgacggggcgacgccggtgtccgcgccaggaacgccagggtcaggaggccgaccggcagattgacgaagaagatccagcgccagtccagcgagaccagccagccgccgatcaccgggccggaggtggacgccacggagccgcccatggcccacaaggccaccgcatgcccgcgccggacgggatcgggataggcctgccggatcagcgacatcgacgccggcatcatcaccgccgcgccggcgccttgcaccaggcgcgccaccaccagcgtcgccagcgtgggtgccccgccgcaggccatcgaggcgaggatgaagaccaccagccccaggccgaacgcccgccgtgcgccgatgcgatcgaccagcgcgccggccgacagcaggagtgcgccgaacatcagcgtgtagccgtccaccacccattgcaggccgtccacgctcgcgcccaggtcatgggccagcgtcggcagggccacgttgaccacgaccgcatccagggtgatgacgaagaacccgagcagcaccgcgatcaatgtcgcctgcgcgcggcgctgcgctgctggcgtgggggcatcgggcgcgcgcgcggaggcggcgtccggttccgatggcttcacggcagccggggcgtcttggagggggccatgctcactttcccgccttggccgcgagctgctgctccagcgccgtgctggcgcgacgcgccatgtcggcgtccacgcgcgccgccagcacctgggtgagctggcgcaactggccggccgtcaggcccacgttcatgctgatgcgcatgtgtgcttgcagttgcgattcggccccgggcaacgccgacagcatgcccacggtggccagctcacggctttgccagtcgaggttgtcgcgcttgaagatgtcgccgaacaggtggctgcgcaggtattcgttcgccgccggcgcgaagtcgaacagcggcccctcgacagggccgcccgagagcttggtctggttggccgtgccggcggccagcagcgcatcgcccttcggaatggggcggctgggcgcgctgccgggcgcgtcctggataccgcgctgtttgcgcgcgtcgagcaccttcatcagctcgcccagcgcattgaggctgcgcgggaagccggcgtaggcgtagagctgcaccaggatttcgcgggcgtcgctgaccgtcatgccggcgtccagcccttggttcagggcggcattgagccaggccatatcgcccgcggcggcgaaggccgcgatgggcacgatggcctgctggcgcgcggtgagggtttcggacgggctggcttgggtggggctcatcggtcgggtctcctgcgcgcacgcaaccgtgcctgcggccatcgccagggcggcagcaagcgcgacggcgcagcggtgcgagcggtggcgctcagcgggcgttgtattgctcatcagtgactttctccatccatgtgacgttcttgccatccaccgtgccggtcacggccaggtgcgtcatcgccgtgccggacgccgcgccgtgccagtgcttgacgcccggcgggcaccagaccacatcgccggggcggatgacctgcacgggcttgccccattcctgcaccagcccgacgccggaggtcaccaccaggcgctgccccgcgggatgggtgtgccaagcggaacgcgcgccaggctcgaagctcaccaggccaccggaggcgttgatgttcttgtcggccggccagacgggatcgacccgtacccggccggtgaagaactcggccggcccggtggccgaggcctgttctcccgcgcgcgtgatctgctgcgcgctgtcggcggcgccggcctggggttcagcggccagggccaagccgttgttcaagaaagccgcacacaaggcgacgttgagaagagagcgcatggggtgtcctttcctggtggtgggcggggtcaggtcagcggcgcggcggcccggcgaggtattgctcgtcggagacgtgctccagccactcgacgttcttgctatcgagcgcttcctggatcgcgatgtgggtcatggccgtgttgggcgaggcgccgtgccagtgccggtggcccggcgggcaccagatgacgtcgccggcgcggatttcgacgatcggctcgccttcgcactgcgtccagccgcagcccgcggtgacgatcagcgtctgccccagcgggtgcgtgtgccaggccgtgcgcgcgcccggctcgaaggtgacggcggcgcaggacacgcgggccggcgcaggcggggcgttcagcgggtcgatgcgaaccgtgccggtgaaccactcgacaggtcctttgacggaaggctgagatccagcgcgtttgagttccatggcggttcctttcagggatgggggctgggctgcgaacagccgaggagccaacgccgaagcacccgagaacgggcgaaaacagcaggcaatatcgtccgtatgaaactttatggcgttcctcattggctgagaagatcgtaaaatcgacatacaatggtgcagaaaattcaccaatgcccaaggaaaacctcaacgacctgcaagccttcgtggcggtggcccgcgcacgcagcttcacccgcgccgcagcgcaactggggctgtcgcgctcggcattgagccacgcgatgctggcgctggaagcacgcctgggcgtgcggctgctcacccgcaccacccgcagcgtgtccaccaccgaggccggggccaggctgctggacgcggtggcgccccgcctggacgagatcgaactcgaactggggtcgctcagcgccgcgcgcgacaagcccgccggcacggtgcgcatcaccgcgcacgaccatgccatctccaccgtcctctggccccgcttgctgccgctgctgcgggactaccccgacgtccacctcgaattcagcgtggactatgcgttcaccgacattgcggcgcatcgtttcgatgccggcgtgcgcatcggggatcgcgtggacaaggacatgatcgcggtgcgcatcgctcccgacctgctcatggccgtggcggcgtcgccggagtacctagccggcaggccgcatccccgcacgccccatgagctgaccgaacaccgctgcatcaacctgcgcctgcccacgcatggcggcctgtacgcctgggacttcgagaaggatggcgaggcggtcaacgtgcgtgtgggcggccagaccaccttcaacaacaccttcctgatgctccaggcggcgctggacgggatgggtttcgccttcgtgccgctggacaccatgcaggcccatatcgaggcgggccggctggtgccggtgctgcaggactggtggccgaccttcccgggctaccacctgtactacgcgaaccgccgacagatcgcgccggcgctggccctggtgatcgaggctttgcgctggcggtgaaaagggcgccctggacgcgggcaaagaaaagcccctcggatgaggggctgaaggtcaggcgtcgtacacgaagcagtgcgtgcgctgccgcgggaagaagacatgcttccaagaatcgccgctgccgttgccaccatcgaacacgaccatttcgtagcggtcgatgtccgtttccaccagttcgtccatggcgatgtggcgcatgtgcagcgtgcccttgctgcgctcgaataccagggtctggccgatggcgtcgtcctggctcatggtgctgacgcaggctccaagctggtgctcgaaatcggctgcgggcgagatgaggtcggggaacatgaggttgctcctatgaaaatggaccagcccggctcctggggagacgggctggcatggggggacaatgaggaaggccggcgtgtcgcgcggctgctagggctcggccagcggcaggcccagcagcgcgggtgcgtcggcatcgaggatgaggatgcgcacatcggcctggccggccagttcaaggatgttcgccaggtcgtctggcatgcccttgttccggtgctcctgccgaagctgctcgacggtgatgccctcggcgtgctccaggttctggtccgtccagggcgtggagatcagtttgacgccgatcgccgggctgtacggcacacggaaggcgatgaacagcatggcctccggcgtggcgatgtccgccaggtcggcgaggtagtgccaggtatcgaccgtgatgtgctcacggctgatctcccagcaccggctgtagtagccggtctcgaaagtcaggcgctgcaccacttcccgcgcagcctcggccgaatagctgtcaccgatgtggaccgggcgaccgtcaaagtcgtcgccatgaacggcatagaccacggcgccgatcacaccttcgccgctgacaccttcaccggcatcgcattcggccagtacctcggcgctcatgccttcggggccattgcagaccacggcgaaatcgttggtgacgatgcaggacgatgaaaccagttcctcgtcggacaggtgctcttggctcgcgtggatgtttcgccagacatgcgggcttccgtcctcgtagctgatggacagcgtgcggacgattttcagattccagtagccgcgaagaaatggattaggtttctgggacatgggaacactccagattgaataatggagccaattcccgccaccgggaactggacccggtgggttgaaagggggaaatgcgtcaggcggcgctgatcgttggcatctgggccagccgttcggcgacgcgatggcgcacattcaggcggaactgctcgtcgctgatgcctgcgagcaggttggcggcctccagcgcgatcaatgccgaagcctcttcgatgtcggcggccaggatggtcttgcgcagttgctcgccgagttggagcgcctgcgaagacgttctgaagacctgaacctcacggctcagatagcaaccgttgccaccgaactcgaacagcctcggcctgctgcaatgccaacagccctcgaactggatggcggtcaggtgatggccgtcatcgaagcaggaggcgatcagaagcaaggcgtccaggtcggagctgccatcgaactgatggtgttcgatcaggttctccaattccccgtcctgctcggcaccgaagtgcgcggccagccgttcgagcagaggcggaatcgacaactcttcgtcatcgggcatggggatgccgagttgtgtggccaagtcttccagaccatccagcacatccgtccattgcggatcattggtctcggtgatctgggcgatgtaggcctgtccgttgccgggatggccttcgtccagcgcgaaggtgccgaacagcgccttgatgacgggggtaacgcgctccagcacgagaacgcccgtaccttcgtagtaatggtttgccatggtggcccctttcgagaaatgagcggagccagcccatgcggacgatggcatccgcagggtgatggagaagaaattgagggacatggccttgtgggcgcatgtccctctcggggggggggaagaaaagcagtggtgcgccggcaacggctcaccagccgttgtagttcaccagcaggccggcgatgaccttgcggcgttgcagatcgagaccatcgaagtccgacagtccgttgaagtggcagcgcttgagcatggcaccgccctcgcgcgcgttgtagaagctgaccatggcggacaggaacatgcgttccccgctgctcaggacgccgagggcatcgttgagctgcagcatgttgggacgcagatcccacttgctcttggcctggttcagaccttcgcgggtgccgtcgccaaaccattcggggccagcgatctcgacaccgcgcttccaggcctcgaaaaaggcttggggcgcggccgcgaaatgctgttcttcccgcatgatctgatcgacgacttcccgcggtagaagctggttcatgacgtgattcctccagttggatcagggaatggcgagctgggaccagccgcctctttcgagggcacgttgagccgcggcatagctgcggaagtactcgcgggattcccgcgaaacggggccttcggtatcgcgcgtgccgatgtagtgaccggcggcgctttgcaggacttcgagcggcaggaacttgccgcagtaggtcagggccagttggccgaaagaggcttgctgggacatagacgggctccttggaaaagcggggcctcgtccctcacgggatggcagctcccgcacgcggttgataaaaagcatcgacgtcacggggacgcgcgtccgcggaattgatgcgatgcggactggtgggcaacgcgggagagacccgcggcagcctggaaccctggctgctggcatgtgctgatcggaatcagcgaacatgtgggcagcttcgtgcgcgggccgcgcggcgtcagttggaaaacggcatccggcgcagccccgattgatgggcgcggggaaaagaaaaagccccgcacgagtgcagggctgtcaggagggggcgtcggcgctgggtcagtcgggcttgtcgcccaggacatgctgcttccacaggtcgaatgcctgctcgggcggaagctcggcaaggatgacgatgggctgggcctgccgagcgcgcagcgaaccgaagtacgccttgcagtcggcgatggccttgagcttgatgcccttgatgaacagcagtttgccgtccttgatgaacagcaccttgttgccgatgtcgcggttgaacgcggctcgcaccttgcgttccgcgtgcatggcatcggccagttcatcgaccaggaagtcgagcgtcatgtcgatgtagtgaggggcttcgccctcctggccgaggtcgagcggcgcaggcggcaggcccttggcgaaggcttcggcctgcgccagcagcgccgccttgccgttgagcgcgtggaggaacgtcgagccgccgtggccgtcgttgcgggcctcggcgatgggagtgccgtcgaacacgacggtggcgctgaagcacatcgtttcctcgctggcgaagtcggccaccttgaggttcttcagcgtgatgcggtcttgcttggtgatgttgtccatgggaagtcctgaaatcgaccgggtggcgacatgcccccgacgggacgtggcggccatcccgtgggttggagaaaagaggcatcgatgccccggtgggcagcgttcgccggtgagatgccgaggcgaactggtgggtggcacgggtggaacccgcggcagccttgacaccctggctgcgggctgctgccgatacatcggcaatgcaggagggagaatggcgcggcccgcaggctgcgtcgccgatcaatccgaagcggttgagcccgtcttgtgcaggtactgcaccaagcgctggcccagccatgccatgcacgggacagccatggagttgccgattgctttgtagcgcggagcatcagcggcgggcttgccgcggtacgggatcagcgtgtagtcgtcgggcatgccttgcagccgctcgcactccacgggcatcaaccgccgcacacgccagtgcgaccagtcgccggggccagggtcgttccagtcgtagcggaaatgcgcctcgaagtcgggagccaggacatagggcttgtctgcaccgccgccgctgatgcgcagtgcgcccgctacggtgccgcccagctcggcggcaagaccctgctcgcggccgcgcagagacacgcaggccaccataggcacgccgtagcccggcttgccgttggacagcacggtgcaagcgacctggccatggcccgactcgaagcgcacttcaccgcggttgttctgggcgaacgcgatggcgggcacgaccccggcgttcgcatggctgttgcgatggccgccagcgcgcagcgtcggcgtcaggtcgagcgtggcatccgcgccgctgccctgggcggtaaaggcgatgatcggaacgcccttgccggtgccgtcctcgctgctgcccttgccgttgttggcggtgtcgagggtgtgggcgatgctgccggcgaccgactgcaccatgaacgtctcggtgcgaatgtcgtgcttggggcctgcggccatcaagcatgcggccacatcgacggggccaatgccgccgctgaatccgaacgtcgtcgtgaccttgccgtagggctgcttcagtcctgcgaatcctgcaagtcctgcgcatgcgcctgctgcttcagcacccggtccagcatcgtgggcagcttcttgccacggcgcgcggcccgcacaagaatccccgagcaggcctgcgcgctcaaaaagtacttctgcgggatcgaggtcatctccaccacttgccacaagaaacacgcgcttgcggcgttgggcgacaccgaaatattgagcgtcgagcacgcgccacgcgatgcggcggcggggtccagacacacaaccagcgtgcgcccaccgatcccctggtggctggagcgcacggctttctccggccagtgcccccaggaaatgcccgaaggcattgctgcggtcgttgaggacgccggggacgttttcccagacgagcgttgccggcgagcggcggtcttggtggcggatttggtcgatggcattggcaagctcgtgcgacgtgaagtcgcttgtttcattgcttcaccgcttcggcgtgatgaagcctgatgttccgtcatcagtagcctatcggtgcatgcgtggttggcaacgactgcgtgtgaagccaccgagacaatgtaggtcggcgaaagccaggtggagaccgcgaggtcgaaaccgcatctgcgagcgccaacgcggatggatcgctagactggtcggtatggttaacgtatgtgaagtgctgataaacaccgtcaagatgaaagagccaaagacgctgacaggctctacccaaaatggggcgtagctggacattcctctgagctttgggaatgcacggacacgaaagctaccggtggagaggcgcaacctaacctgacctgtgaatcaagtggaacacggtaagcccgtatctctgcccctcggggcagacagaccgtaaggaaagttcatggagatgcgggtagaggaatgtggaaaaagcgaatgccgccctgtaatggggcggataggggctgagccgcgaggcaacatcgcttcacgtgaaaacgggcagacttccacttggtctttctttacgagattgtttgaagaacctttttaggagagaaagcaaatgactacgcaagctgcttgcgcgggtgcgctctccggcgactcgggcggatggcactgcatcgactgggccaactgccaccgggaagtcaggaggctgcaaacgcgcatcgtaaaggcgacacaggaaggccgctggggcaaggtgaaagccttgcaatggctgctgacccactcgttcagcggcaaggctcttgccgtgcggcgggtgactgaaaaccagggcaagaagactccgggtgtggacaaggtggtatggggcaccccggaaaagaaggaaaacgcagtagatgagttgcggcgccatggccataaagccagaccgctgaggcgagtctatatcccgaagtccaatgggaagctacggccattgggtatcccaaccatgagagatcgcgcgatgcaggcattgcatctgctaagtctgctcccggtgtcggaaacccaagctgatggatgttcctacggcttccggcccgagcgttcagtggcagatgcagtcgataggtgcttcagggcgcttaatggacaacattccgcccaatggatactggaggccgatatcaagggatgcttcgatcacatcagccacgactggcttctgggcaacgtgcccatggacaagcggatgctggaaatgtggttgaagtgcggcttcatggaagcaggtgcatggtcggaaactgaggcagggacaccacaaggcgggatcatctcgccgacactggcaaacatggcgctggacgggctggaacaactattggaacagtccttccgctcaagaatgcgagatcggcagatcaccaacccgaaggtcaaccttgtccgttatgccgatgactttgtgatcaccggagactcagagaagcttttgatcaaggaggtcaagccactggtggagcgattcctggcggaccgtggactcaccttgtctgcggagaaaaccagggtgacgcacatcgacgaaggcttcgacttcctcggccagaatgtgcgcaagtacaaagggaagttgctgatcaagccatcagcagcgagcctcaagaattgcgcagacaaaatccgggccatcgtacggtcgaacaaggcagccaatcaggcatcgctaattcacctgctcaaccctgtgatccaggggtgggcaaacttccatcggcatattgttgccaagaagaccttcaagtctttggatgatcatgtctggagggccctgtggaaatgggctctacggcgtcatccggcaaaaggcaaaaagtggattcggcatcggtatttccatgcgtagcgtggtcgtcaatgggtatttgcagcccgatacgtggactcttcgagcaaagaggctcgatgggcaaccctccgtaaggcagtagacaccaagatcaggcgaaatacgatgatccgcatgggtgcgaatccattcgacccggagtgggaaacctactttgaacagcgcctcggcgccaagatgaaggacaacctacaaggtcgaaaacgtctattgcacttgtggttggaacaggacgggaagtgtcctgtatgcgacgaaccgctgacgaaagaaagcggctggcatgtccaccatatcgtccgtcgcgtcgatggtggttccaatcaaagcgggaacctggtgatggttcacctgaactgtcattaccagatccacaaccttggtttggatgttgtgaaaccggctccagcaatggggctttgaaaggcttgagccgtatgaggggaaaccttcacgtacggttcttaggggaggatgtggtggcgacgccatgtccttacccgaccacataggcaagggaaagggctccgcgcgggtcatccagcccgcgacggctacctgcaacgctgaacgactggcacggcgtgccgccgaccaggatgtcgggtgccggcacggtgccggcgcgcacctggcgggcgatcgcggtcatgtcgcccaggttgggcacgcgggggtaacggtgggcgagcacggcgcttgggaacggctcgatctcggcgaaccacgcggcttcgaggccgaggggttgccaggcgaggctcacggcctcgatgccgctgcacacgctgccgtacagcagtggcgcggcctggggcgcaccgcgtggggtgcgaggttgcgggttcatgtcgggtctcctgttcgtgtggccctggaccgtgtggcgtggccggacgttgattggcaggagaaaggcgccgaaggccttgcggccttcggctcgggaggacggaaccacccgtgggctgttgcaggccggtcgtcgctagaaccgtctgctcatcaagcaatcgcacccggcgcatatcgtggttggcgccggcatcttctggcgcacatccgcgcacaaaaggagcccagtttttcgccgttgggcacggcatcgaataccgctgaccacgaaggttctccgggtggctcgcagcctggcaagccatcgggggacccttcgcagaggcggaaaaatgcagatcagcagaacacgccgggaaaccccggacacggttcgcggagaagctaccttcaggccccgcggccgggggcggccgagcgggacgcgcacacggacaagagaaggcgttgcgcgctgggcgtcccgcagggcgtgcgggacatgggccacgccgccgatggcgggcacggctctcggggagcggggttggtcaggagcccttgcggccgctactgcgcgggcgcgaggcaccgcgcttggacgtgccggaatcgaccggcagcgtgcctttgcagtcggggtagcgactgcacgaccagaaggggccggtcttgccggtgcgctggcgcgtcggtgcgccgcactgcgggcaagcgggaccctggggaaccttgatggacagcgaggtgctgccgtactgcacgatcagttgcgaaatccatgcggcctgcttgccgatgaacacatccagggtgagctgtccggcctcgatcatgtcgagcgcctgctcccacacggcggtggttccggggtcggcaatcgccgcgggcacagcgtcgatcaacgtgaatgccgcatccgatgcgcgaatggagcgtcctttcttcacgagatagccccgcgtcagcaggccggtgatgatgttggcgcgcgtggcttcggtgccaatgcccgtcgtgtccttcaacttctgcttcaggcgcgggtcggtcacgaagcgcgccacgcctttcatcgacttgaccagttcgccctgggtatagggcttcggaggcagcgtcttgagcgccttgacttcggcctcggccacttggcatgccaggccctcgcgcagcgcggggagtacctggctgcgcgcggtggtttccccgtcctcgtccgcttgcggctcggccagcaccaggtgccaaccctgggcggccacctgctttccggtggccaccagcttctgctggccgcaggacagctcggcgatcgtgcggtcgaactcgtggtgagggaggaactgcgccaggtagtgcgcgcggatcagccggtacaccgccagttccttctcgctcatcgccgagaggttcgcgggttccaaggtgggaatgatgccgtggtgcgccgtcactttgccgtcgttccaggcgcgcgagcgctgggagcggtcgagctggcccatgatcgggcgcagcgaggggtcggtcttgagcaggctgtccagaacagtcggcacctcggcgaacatgctttcgggcaggtagcccgaatcggaacgcgggtacgtggtggctttatgggtctcatagagggcctgggcgatctccagcgtctcctgcacatccagcccaagctgcttggaacaaacctcctgaagcgttcccaggtcgaacagcagcggtggcccttcgcgcacgcgctcggtctcgactgacacgacctgggcgctgctcgcagcgcggatctgctgcgcggcctgctgggcgataggctgctgcaggcagcggccggcatcgtcggtgcagccatctggcggaacccactgcgcgctgaaagcctgaccgcccgcggacagggacacgtcgatggcccagaacggcaccgacttgaaggccgcgatctcgcggtcgcggtccacgacgagcttcaaggtcggcgtctggacgcgaccgacggacagcacgccgtcgtagccggcctgaagcccgagcaccgtgaacaaccggctgaggttcatgcccacgagccagtcggcgcgtgagcgcgcaagcgccgagtagtacatcggcagcgtgtcggatgagggccgcaacttgccgagcgcggtgcggatcgacgcatcgttgagcgccgacagccatagccgctcgatggggccgcggtagccgcacaggtcgatgatctcgcgggcgatcagctcgccctcacggtcggcatcggtggcgatgaccagatgggtcgccttcgccagaagcgccttgacgaccttagaattgcgtggcggtcttcggtttgacctcgacccgccactgctgcggaacaatgggcaactgctccagcgaccagcgcttgagcgccgcgtcatagacctcgggagctgccgcttctacgagatggccgatgcaccaggtaacggtgacgccagagccgctgagacagccttcaccgcgctgcgtcgcgccgagaatccggccaatgtctttgccctgggagggcttctcgcacaaaaacagccgcatgtccgtccatccgaattccgtggttcattgagttgctggaatcgaggatgccgagcaccaccaggggcagcagcaaacaagccgcatgcggtggcgaccactttcacgagatggaatggctggtacgggagtggcgtgcggccgggagggtgcggttcgggagccgcggttttcgggagcgcgtggaagccggtggacgttgatggagctatcccctggggatagctcgcgagggcatggggcgacggacgactgccgccgccccatgctgcatcacttcctgcgcttcggctccttcggcgcggccggttcctgggcggcctggggattcggctgcgtgtcctgcgtggtctcctgctgcctggggctgagggtcacggactcaatgcggaacggcaggatgccgacgctgcgcgcgttgatctgccaggtctcgcgcggctgatcctcgttgtccgtccagggttcgcgctccatgcggccgacgaccagcacgcgcatgcctttctggtacaggtccttccagtgcgcggcgtcgcggtgccagatttccaccggcgcccagaagccgccgcgatcctcgaagtcgccgcccttggtggggacggggttgtcgaaatacacgttcagccgcagcaggcgccgcggctcgtcgttgccgttggggaactcccggtactcggggggcgaaccgatgttgccctcgccagaaaaatgcgtgctcatgttgcaatctccgtggtggttgaaatacccgcacctggtcggtgacgggcgcgtgctgggttgcccggcgcgatcaccgatcgcgcagtgcgggttgggtggacttgagccggcgcaggtaggcggcttccgccgcggcggccttgctggcgcactcctgggcctgcctgcccaaggtgtgcaacaggctgatctgcatgttcagcgtgatgcgctgaagctcgatggcgtgcaggtcggccagcaggttgaccggcgtactggtgctcgccatcagctcctgccacagggccacgcccatggccgagcggtcgtgcctgcgccagcgaagaaacgtcgttcccgcgccagttgcctgctgggccagctccacgggcagcagatggaagggatgcccggctgcctgttgcagcaccagtcgctgcgccaagccaatcaactcgtcgcgcatggcaaagcactggttggcccagtcctccagactccccttacctttaaaagtaaaaggtcgtaaaaggccttttagagaggctgcgtgttccagcctcatgaaggctgtctgttgcagcgggcggaagtagcgggtttcgcgattcgggtcgctcatgcctgctcgtcctcgccggccgtcgtttcgggagcctcggtggcggcggcttcgtcactggcggatggtgctgcggcaggaccgtcaccgcgctgctgcaggccacggcgcacgatgggcggcgcgaacttcgagcggcgcgcgccttccagcacgtcctgcggcagctcgccgaacttctccagtgctgcccgcgctgcggcattcttcgcggcgaagtcgtcgcgggtgcagcccgagtagcggtactgctgcgccaggctgaaaagactgcgcagcgcatgcgcgccttcgttgagccagcgttcgagcgtcgagcgcttgcgggcgatgtcgtcgtagtcggcgagcaggtacacggcggcaaagccgagctgcgcattgacgaacagcggcagcttgaccggctggacgttgaggttttcgccgagggtgagtgccggcggcacgctcgcgagagcctggtccacctgttcgcgcagcgattgcagcgtggccttggtctggtcgagcttgtcctcgatgcgcagcatccagaagtcgctgtacgggtcgtcctgctccgagccgcgccgcatcttgttcatctgggcgatgtagccgttcaggccgacgatgcccggtcgcccctcggcggcggcgcggccgtgccagatgcgagaggcgtggtgcgtgtgcagcgtcagcgacatcgcgctgcgcaaggagccgagattcagttgcaagggttcgttggtcgttgccatggtgtccgctcgttgttggaaaatagcggccagcttcggcaggaagcggaaggcagtcagtcaacaaaccgaaacccgcccgtccccggttcagggcgcggtgggtgcatgcggcgcgagctatccccaggggatagttccactgacagccaccagcatccaattcaccgccttgcacacctgatcacttgctggcgagcaggttgcgcagccgctcgatgtgctgcttggcgacttctggcggcactggcttgccctgcggctgggatggtggcggtgctggtggtggcggccgctcgttcggcgcaacgggtgccgatggcgcgtccttcttggcccaggcgttgaactcgccatggatggcccgctggacgatgccgaacagataccccgcaggattgcggatgccatggttgctgcatcgtgcagcccattcgtccagcaccgcctgcctcagcgcagcatcgacctgctgtagtgccacccgcgcacctgtctgctgctctgccttcagttccgcgaagcgcttgggccattgtagatcgcccagcgcgcgcgcatgcgtggtagtacgtacttcatcaatacgactactacgtactgtacgggcctgcttcggattccgaagagaggcgtctggcgcgggtttcggccctgcttcggattccgaagtggggtcatcgggattccgaagaaggctcgtcggcccttcttcggaatcgtgagtggcctcctcttgtggataactttcggtcgccgtgatgccttggctggcgaggcgttcggccaggacctgcagccgtgacggcagcgtgcggccggacagcagcgggtcttccgcgatttccttgagcgtgttcaggccgaccatctggacggccttggccgagtggccgagggactggctgaccagcgccaggtaatcggcgtcgagctgcatcgcttcaaagggcgtcagcggctcgtcgtgcaggacatagaggttgccgaggatgcggccggtcttggggtcgcggcggcgccgcaccaggctcaaccatcgggtgaggcgcagcagcgtcagggctcgcgccacggtttcgtgcgaggcttgcccggcgcagggcatcgacgccagccagggccgaagctgttcatacgtcggaaacgccgtcacgccatcgtcgttgaccatcagccggaagacctgccaggcgttgcgctccagcggcgtcaggcgacggtcgaggaacagccgtcgcggtacggtctcgtgccggttgccgctgaacagaaaggcatcgccagacgccgggcccgtgggcatcgcgacaggcgtgggtgtcggcgggggcgcgtcggcgttgggcttgggcacaaggtctttcagcgcagcgtcgaacaggtctgcgagtgcgatggggccacgccgtggtgcggtgtcgtccacggccatggtcaacccaatccttgatcgacccagctcttgatcgaggcccagaccaccgacagaggcagcgacatgccttcggccaagtccatggcggcatcgaggatggaggtctcgtcttcgagatcgacgttcctgctgctggtcacggccttccattgccgccacagctccgtgtcctgcttctcgtccagcacgggatggcgacccttgcgcttgggcaggccgaggatttcgcggcgaagcgccacttcctggtgggtcaggccgtagaagcggctgaccatttcggtgctcgcgccgaggcgcagcatgcgatcgaccgtggcgatctccttctccacatcctgcgcctgcctgagcagacgccggagcacttcgcggttgaccgtcaccgagcaccacgagacgttggcgttggccagcacgctgatcagcgcgggatgcttgagggcgtccagctcttcctcgccaaaccccatcagcttgcagcggcgcagttgcccattgcgcaggtcatagagggcctgggcgatgacggcctggttgagtgggtgtggtgcggacatgctggcctccctcggtcacttttcagggtccgcagcgccggcgttcaggtcgagcagacggcgggccagccgcagcagccggaacagcttgaccagtgcggtgtcgctcagtcgccgggttgcgtcgccttgtccgtgcagcagcgccggcaggtcgatgacgacttgcccgctgtccaggccgaggtcggcaggctgctgaccggccaggcatgccagcagcgccaggacggcacggcccagcggccccgggtcctgggcgtgggtacggcaggcgaaaccgatgccgtctggacggtcatcgatgcactcgtccaggcgggcctcgcccgcgatctcgcgggcgaactgcgcgacgtggatgcgcaggcgctcgggcgtgtccaggctcgcgtcgatgtaccagacatcagagatcggatagagcccgccggcctgcacggggatggactgcaagacgttcgccgagaagtcgggcggcagcgcatcgcccaactggtcggcgaccatgcgctggatggactggagccgttcggtcgttggcgccggtgagacgatgtgcttctgaagcaggtggtcgttcgctgtcggactggccgtgcccgcctcgttggcatctgcgtcgctctcgcgcgttgaggtgggagacgcagggcttgcaggctgcgctgtcggtgttggccctgtggtgggcggcgaggcgttggcaggtgggcgcacgataaccccaggctccggcaaggcgggcggcgtcgaggatggcgtcggatcgctgaccagagcgcgctggcggctctcggattcggtcatgtccagcgcgagcacgtcgtaatcgacgcccagcagctcggccatctgaccgatcagttcgtcctgtacgcgctgcgcggagaactcgtcggcctgcacatcaaactgcgacaagacttcctggaagaactcgtcgaagtcctggaccagcgcgcgacccttggtgtagcgttcccatgcgaacatgcatggctttgcgcatcaccgacagccgttcgacctggtggcggccgaggccgccatagagcacggtggggatcgccggcaggaggtagcgcaccgcgtcgttcatgcggctgatgtgcgactgctggaccgggaagccatcggcggccaggcggcgggccagttcggactggctcagggcggcgccgctttcctgttcgtagaactcgcgcgccttctcgacgccgagggcgcgctcgatgaaggtgaggccgccgcgcagttcgttctcggctaggtggccggtcagcatgacgacttcgccgcggctgggccacggccggaacaggcacgatatgcggaaaaactgctcgtccttggtctcagaccacagttcgcgcaggatcgccagccgagtgttgccgccgttgcggatgatgtagtggtcctcaccaggccgccgggtgatggccggtggcgcatccaagccgcgctcgcggatggatgccttgatttcctcataggccggattgcgcttcttgcgcgggtcatggtcgtaggggcgtaactggtccagggtcacgaccatgggtgtgtcggcgatcgggtcgctcaaggccgacgcggccgggccgctgcgctcgaaccctgccgcgagcagcttgccggccatttgctgggaggtgatctcagccatggctgcctccctgcgcttgggatcgtgcctcgcgctcggcgcggcggatctgcgcacgggtgttgagggcggcccggtggtcgctggccgtcgaactggtgtagatcgcggcacagcctgccttggtgaatttgaggtggccgcccggcgtgcgcttgacgtgccagccttcaccgacagcgaactcgatcagggcgcgcagccgtttgtgccctcgggccaattcatgtgcgttcgccatggggcctcccggtatcaagagggactggcgaacggccggacaccgcgacaaatcggtgttgccactgcgggaacagctcgccggcgaggccgcgcatggtgtcgagcgcggcgggggcgactctgcccgatggctggcggtattcgacacgatgcactggcaggccgcgcgtcgcggcgcgcggataggcttcgatggccggcacgtcggtggtcagcacgcggatgccggcatggtcctggaacaggtcgcgcaaggcctgctggatcagtcgggcgttcgccgacacggggtggacgcggttgatgagcaggtgcagcggtggcggctcgatgccgaggtgccggtacggtgcgatgtcttcgagcaactgcatggtgccgcgccgcagctcgcgcgccgcgaggatttccggggtcacgggcgacagcgcaacgtcggaggcgagcaccgccatctccagcagcaccgagcgcgcgccctgggtgtcgatcagcaccaggtcatagaggggagccaggaccggcagcaggtgccgtagccgcaggcgcccatccggcgcgtgcagcagcaaggtgttcaactcgccccggtggtcgttggacagcaccaggtccaggcccgaaatgattgtgcgggacacgagctggccgaggtcgcgctcgttgaaggccagcagctcatagatgccaccaggcgcacggtgttccagttcgtagtaggacgacaaggtgggctgcacgtcgagatcgagcagcagcacgcgcagccccgcgtcggcgacgagcccgcccaggttcgcggccgtggtggtcttgccgacgccacctttcgttgaaatgatggatacaacctgcatggcgttctccgtgtgaggatggaaggtccgcgggagaacgggtcaggcccggttgttgacgcgctcggcgatccactgatcgatttcgatggaatcccagccgacggcgcgcacacccaggcgcagcgcctgcgggaactggcgcttcttcatcaggttgtagatgtgggcgcgcttaaagccggacttcgcttcgacttcttccagacgcagaatgcggcgctcgttgggtggcagtacaggtgtttgcgacatggcggtcactcctgaacgctcagtggcgtttgttggcgtgacctctattcaatagacacggctgcggaaagacattgcaaatgcaatctccgcgactgcacatacaagctagtaatcctcagagcgtggcgctatgcagccggcgtctggccgtggcgaacttgccgttcaacgtccgctcggcgatccccatgacgccgtggtgatgggcgaccagtgcgctgaccacagcctcctgcgtcttgaagctgaagtacggcgtgcccgagggcgactggccgagcatcagctccagcatgcccccgatgatgttcaggtaggtggcctcggcccgatcgctgatcgggcactgcgcgcaggcgggaatcaccgtggactgcttgagcagcgcgtcgtgcttgtcctgcagctcgcgaagttgacgcttggactgttccaaggcggatttcagggcgagctgctcaaccagcatggcttgcccagtctccagcgagatgaagggatgggtgatgcgctcgctgcgggagaagagaaagcctggtcgctgttcggggtagtgctggcgcatccagcgcttcagatcgacatggcggacggtgaggtcgggagagtcgatcaactcggtgtcgtgcatcgtgatgccgtcccgcccgaagggcagctccccattgaggatgccgtcatagatgcgttcggtgtacagccgcagttcgccccagcgtgggcagtccagcgaaagtggcaggttccggggcgacgaaatcgaggccaggatcacctgctcgtaccgcagcagcccggtccagcggatggacgcttcgatcgggcgatagaacacctttgatgtgggtgcatcattcttgttctcttgcatgctccgtctccttccaggagaagaactacatgtccgactcctttgccgccgacctcatggccggcgtgttgttgtctgtgcaggaagcgagccccgagggcggcttcgtcattgggcttgagtacctcttaccagtcggcgctactggtagccgtcgtgtgctcgatgtgtaaaaattcatcgactagaaggtcgagcatcaggacgcaggctcgacagtggcgctcacgctatcagggtcgtaagaagttgcggcccctgcaaaaccgtctgggtatggcctgatatgccaacggtctcaaggggtgcgaaggggatggcaatcgtcatccaacgtccagccggacgcagcgaatgcgctcccgtcatgctcatcccggcatcctgatatatccataaagaatcgcgcgccgacgcaccatggctagggtgtgcgttcttccggcgtggcttgcgcagatgggcgccgcgatgtgcggtgcgcgcctttccacggtggcatccgaactgccccgacatcggaagcctgctgcctagtcggcatcgcggtgaagatgcagaagcagagaacgggatatgggtggctagttcgagtccacgcggatggcgatgtgcggggtgcgggtctggtgcgcgtagtgtgcgtctctggacgtcgatggatttctttggacgaacttgttgccggggacgaaaaacaaggctacaattgaggtcttcgctgaccacctcggcgaagaaagtgttcgggaaacaacgacttacgcgcctagtaaatgtctcgtttcccgctccaatacaatattttctcaatatttgatttattgattggcgcgcagctggcccatgtaagcgtcagtaagcgtcagtaagcgtcagtaagcgtgaacagcatcggtcatatattaggcgggtacttggcgtaaacgtccgtaatcccactatatgcacgatgcccaagcatcccttgaatgttctccgcagtcatgcgctccgagcgtagctcggtagctatatcggcggtgtaggcgatcattactttaatggtcatctgcatggcctaggctttttcaattgatcgctaagagacctggcggccattagcggccttgtgtttggcttgcgattcggcactgtcggcaaaaacacggttcctaatcttgtgaacggccaaatcgcctgtgtgctttctggatcgccagattacgttcaagtgcgtatctgaatgcttccggtagcggtagtgagcgcgatgccggaggcgaattgcggaaattttctacatgcgatcacggcattttctgagaaaaatatctcatttctcctgatatgttaggtattctttcatttgattgaattgagttttagaaatgtccaatttatttagtctatgtgttttcactaaacccatagccgcagcttcctaaggctaaagatgcttatttatgaaaaagaggcaacaagggttcacgctgctagaggtcatggtcgtgcttgtagtaattgctattcttacggcgatcatgctgccgctgtatcagcattacgtcgccaaagcgcaagtaatggcagcattggctgacatcacaccaggcaggaggcctgccgaaatcatcttaaccgagcctgtaatgagcaaccacattgcaggcagtactgccgccactaaaccgcaccagctcggtttagcgtcctctacaccacgatgactggcttaacctcacataagccggagatggacggcgacacgtacatcacgtgcgtgatacgaggaaatgcgttggttaacaatagaacgattaattggaccaggctaaatatggcgcatcagttatatgaggtcattcgcgaccctcggggcggcacgcatccctccataaaaggcccgccggtcggtgggcgttggttctgcgtgaccgacgtgcccgaaccgctctggccagcaggctgtaaggggtcattgccgtcgatcagttcggacggtaagtaatggccgcgtgttcaccttctccggcgttgtgtgccttgattttctgcgcataaaacgcctggataagtgcgttatctatcacccagcgctcggcatccatcacattcccgttaagctccttccatgtcgtccaccacggcgagccttctgcaggagtgatcgcccctaattcaacgccgttgtagcgcctgtaagcagtccagacgctagctaagatggctgctgtggttgccgtcaatcttcgaagcaaggccccacgaaaaccaacgcacaggcagcagcttagtaataccgctgctgccgtactgtttaatcgcgttatacagcgagcgaatgaccggacccgcccgccacgcttccacaggctcatcaattaacggctgcctgtgaacgccaaggcaccacccatgagccaaataaacaagcttgagcacttgcagcggcgtgagcgcccgcccctcttgtggtgccttttgcaaaaaggcattagcaatgatggttggcgagtaaggcatataacctattacgcattagctaatgaaaaatcaccataaagaaagtaaagatattagcctgaaattatgatatgtggtggggttctggaacagcagaaacccctaaaaagatttccgcaataggtttttacagtctaataaattcagtaacttacgttgatcgtagcaacgcctattgcggaaatgaatcacaataagtaattgattttaaaagataatggaacttctatcacagaagaagaacgattctcgctgcaccgcctcaagcaccgagggatcaccgagagtgagaataagtgcccccggagggcaccgcactgaagcaatgcgcgacggctacgatcatgaaatatctattgtgggagatccaaagaaaccagagttttccagatcgtttcaccggcgttataaataaatgcttttggcatcatattaaggtattgatttatatggtgccgcttcacagattcgaactgtggacctactgattacaaatcagttgctctaccaactgagctaaagcggcaattttttacatgcatgtctcttgttgaacacacatggaatttaacacgaactcttcaacgttgccttatctaggatcaaccctaccatttgtatttcaagaccacttaccaatacaacaacatcaaagcacaatcgggtataacgcgatacggttcggttctagcgtaaggttgcacaatccaatgatccaatatgatacccgttcaatcgcacttgcaaagcggcaaattcaattgcgctacgtagatgaatttcccagccagacacatcacctgatagtacatttgcctggaaaccagcagcggcaagatcagcacgcattcgtttagcaccttcacggttgcgatactgacctaagatcacttcattccctagcacataatagtcgcgaaaaccagccccaacaatgcgcttggcgagtgcttgtgctgaggcatgatcgcttgctgacatgactactcgatagttgtttgaatcgccactttggagtgcacgaatcattcccttgtctacatccttccctaacgtggccaacaccgtgcgtgcatcagcttcactggtaaacgggccaacgttataacagtaagtggaaaccttatgtatgggagtatccaaggactttggtttttcaacttggatcatcggtagcaactccagttgaggaacgccaacaggcgatgacgctgccacgggaacaggcacctttggtgccgactggttcctccaccagagtgctacgccaaaattgaggacaaccaaaaccaaaatgagcgcacgcacaagcatagagacgattctaaacgttagctgcaacggcagcccagatcgccaggccatccaatactaatgtaggacgatgtaccacgtcgcccaaccaaggcaataaagatgctacacctccaccatgcaacaataatcgaaccgactggtccaaacgttgatgtgcctcatacaggctacgttcgatcaatgccaccgctgcaccattgcaccctgacaccaacgcatcctctgtatcttccgcaaactccaagtagttcccaccactgagggggagttgctccgcgcgtgcatgcaacgcttggcgcatcaatgtcggtgaagcactgatacgccctccgagatgacaaccattggcagccaacaaatcaatagtcaatgctgtcccgacacccactaccaggacattgccctcaccatacgaaccaagcaacgctaagaacctatccactccaaaacgttccgggtgagcataggcaattcgtactccggcacatgcagcgacggttgcagccacctggacttgctcgaagtggatttttaatacttcgagcacatgtgtagtaatagccggagcagcgacactcgccaagtaagccacacgaccacgtggtagctcctgtaacgcaaacgcgtccatggtctctgttaagtacggcaaaaccgttacaggaccaatcacaccttccctgagcgatgcacatttaaaacgcgaattacctagatcgaataaccaatcattcatattggtctgaccgaaacttggccagtatggaaaggacgcaacacgccgttaatttctaccaagagtgcaccatcggcggccaaaccacgcgcaataccaacatattttagattagcctcttcaatccataccgcacacccaacaagacaatccaacttggcatagcgcggcaaaaacggtgccaagccctcaagttgaaacaaatgtagtgcaggcagcaatgccgacaacaatagtgcaaccaatgcattacgctctactgtactgcccgcaagagtctccaaatcgacccaaggctggtcaatctgctcagcaaaatttgttggcatccgcacattcaaccctaatccgatcactgcacgtgcctctccctgtcgttcaactaacacgccgccaagcttccgatcattatcaacgagatcattaggccattttagtcgtacgtgggagaagccagcggcaatcaatgcttcagcaattgctacgccaaccgccacgctcaaccccatcagttgtgccgcgccgctagaaaacactcgtgacaatgacaaataaatatttgctgctaatggagaaatccagatcctaccacgctggccgcgaccgcccgtctgacgctccgccagcaatacttctacaccatcggccaacgccggacgcgctaacaaggaagtatttgtcgattcaagcgtccaagccacatccaacacacgaagctcggcagcaatagagtgggataattctgcacggatacgctcagcattcagtaaggataacggtgcagctaaagcatacccctgctctgcacgtgacttgataggaatgccgacggcacgaagtgcttgaatacacgccgcaattgtagcctcagtcattccagtcatgctggccaaaacattgccagagacataactacaccccaagcaggtcagcagtacacgctcgtccacattaaatttccaaccacggaatcaccattatgcgagatgctgccaagagtgctcaaacaaaatttgaaaactacatcaaattaggtatttttcgacaatcttgttgattcaacttacaaatccggacagctataaacgcttaaacacttttagcaatgactcgggaacactgatttacacaaaagaaaatggagcgagaaacgagactcgaacttctgcgtcctatacgttcgcgacgcaggttggtatccttatcacaactgatcgacataaagcatcatgattggggcgtagtgctacaacacaaggatctgctgtatgcaacgcgatttgtgtaggctgttactagttaccgcatttgttaaagacaaatggtgagctgttaaggttatgcgacgtatgtgtcaactagagggcggatgatataaaagcaacgcgtttgcgtagcattcttgtgcatggaccgtatcaccctgggctgcgtagttgtggccgagttcctcccaggtttctgcgctcgtccctttgtcaatggcacggcgcaaaaacgtttccgcctggctatactgctgctgcttgcgcgctaatcgtcccaaagtcagtaataaatttgggctatcggggtgtagcgttagccagtgttctgcgcggttttggcgtgtttcatattccttcaatggtaaaaagccatataggcgtatcaaattctcgtcccaggatctgtctagagtttgttccaggctcagcattgctgcattttccaagtgcagtaccgttgctcggatagcgtatgtgccgacgatgtttgggtgcgtttttagtgcctggggcaacgcttcccaatgttcagtcagaacgttagcgtctttagcttgacgtagcacattctcaatcgtctcattttcaaagcgcacatactcaggatctgagagtaatctttgttcgcgcaacgtgccgaggtagctgtaggcctcgtcggcacgtccgatctgtatcagtgtgcgtgcgcgtatcagtaaacctcgtgggggtagggggcgtgtttctagagcatccaggacattaatcgcatcattagggcgctgtagtgccagcaatcgttcactttgcagtagtgcatgtgtagttggatcttgtttggcgagtttgtttgtcaatacgttggctgtatcaaaatcgccgcgcatatcagccatgcggattgctgttgttagtgcgattgcactgacttctgtgtcttcgctggctgctatcaataaccgttcggcaagttgccaatacccatgatcgacattgcgcaggccttcgattaagtgcgtatgtccttgcttgtatttgtagcgctcccaaatccggatcggtagtgccagcagtgatcgtagcgaccacagtagcagtagtattatcagtagtaggatggttgcttgtggcactgtcgtgatgtaatcgttgcctccgatccggatcactacatcacccaagtcgcggttgggctgctgcaatagccattgtccgctgaatatgcccaggattaataggaagaaccacacggcgaggttatgcaaaatattcattggtggtggcttccctggcggatgctttgtaattgcagaagcgtggtacccagttcagacagtgtgggacgtagttcggctttagcgagtaaaacgagttctgcatgccgtgcacgctgcgcagctgaatctggccacagtcgttgcatcattgcatcaatccgatgcaatgctgtgacgtagctgcttgggtcattacgttcgactgctgcacggaccaagctcaattcaatctgcaatgcgtcttgtgcactctggcgttcagactcggcgagtaataccgggctatgggatggagtgatacgcaccagcggggacagtaccttatgccaccatggctgtatattggtggtctcaggattagggttttggggaagttgttgtaatgctttgtcgaagcgttccagtgccgcattgactcgtttttgtgggctctcgcccagagtatccagtgcattgcgttcctgcatcaatgtttggcgcagattgaggtaacctggatcgtcgaggccttccaaggtggaggcggctagcgaataagcgcggcgtgctccatccacatcactagcgattgtcaaaagctgttggcccaagcgtagtagggtctcgatttcatccaggcgtaatgcttgagtgccatgtcggttcggatccgacaatcgcgccacggtctgttccaacagggcactgcgttggcttaagccaagtatttcatcgcgcaacacgcggttggtatcgtccaagtcgcgcagacgtttgtacgcaaaatcttgcccgctacgtagtatttgaagtgtctggttcaggctttgccagtgttgttgttcttccagttttgcttgctgtgcagcattggactgagcctgccagtatcgccagccataccagctcatcatcccaagccctgtcagtgttagtagcagtagcagccagagccagggaatacggcgcagggtagggggcggggtctcgttcattattggtggcttccttagggtactttggcattgccgcaagctggatgtcattgtgctgttttgtctggtcgaaaagccgctgctgttgctgctaactggcgcggcaatggtcctgtagtgcgataaacgctgataaatcctcgcgcgcatgctagatcttctagccgtttgcttgttgcaatcactggacgctggtacaggatccttcgcaggttatccggccattgtggcagtaagagtgccaaagcttcggcactgctcagtgcaagcatgctacgtgtggcattacgctggagtacatccaatgtggctgtgcgcagacgtaacggttgacgttcgtagacattggcacgatgtaaccgtatgccattttctaaaagcttctgctggagtaaatcacgccctcctggtgcggtaataagtccaacttcggttgggggttgctgcgccagtaatgtgagtagcccttcactgttcatttgtgttgggtgcaacacgcgtgtaatgccgcactgttgtagcatgcgtgcagtgcttgcgccaacgcacaaccatacttgtccaggtgaagcgcgtagcgtttgcagagcatgtgctgcacgtactgcctctggactggtgaaaaccagagttgatgccgtcaatgctgatgctaatgcagagcgtgtctctggactgtctagacgctttaatcgccacggggatagcgcgattaatcctcctccgtaacgtgcgacggcacggcgcagtgcggcgtggttgtttgccggacgtagtgacaacaaataccatggggcgcgggcttggtctggtcttgtcatggtgtgcattatggatcggatatttgttgaatggcgtttgtcaatacctaatggagtgaagatggcgtgggcgactcgatttaaatacccatgggtatggttgctgctagcagccctagccttagttgacgatgtcatggccatggatcgtgtgcagagacgggcttgggaggcgactatagatgcttatgttgttgcagtgcgttggagtaactttgaggacgttgaggaaatgcttgattcagcttaccgtcttacccattcgctgactgatttggaccgcgcacgttacgcacagataaaggtctctagctatcgtgagttgcgtagcagtctgcaggccgatggcatggtgctacgtgaggtggagatcggggtgattgggcgcaatagtcaagctgagcgtaccgtccgctgtactgaacgctggcgctgggacccagggcgtaaacaatggtggcttgtctctgggttgccggacttatggcagggggagtgaacttactttgacttcccctgattgccattgagttatgcgacaatccccagttcacttctccattaattcctgtagatccgtgaattttgaagagctacaggccttcgctggccgcaatccgatcctttcgctggctttcgttggtctggccattgcgattgtcgttacagaaactgcacttctgtttcgtcgttataccgcgttgaagccggctgatctgactaggctgatcaatagtgagaatgctttagtcgtagatttgtcgcctagcagcgatttcgaaaaaggacatattgctggtagtcgcagtgtggttgagagtaagtttgatcctgaaagcaataagctgctactgagtgctaaacaatcccccttggttgtggtgtgtcgtaatggacatatttctgctgcggcagccaagcgtcttaagaatgctggctttgagaaagtctattggcttgacggtggtatcgctacttggaaaatggctgaaatgccgctcatcaagggacgtacctgaatccacggactttattggcatggagtcatccatcatcaggtacagcactcatgtgatactcacaaagtgtttgctaatccccacatctatttacccaaatcatttctggagttagaaatgtccgacgaaattaccaacggtgctgctaaaccgactgaagcaatctctggtcctacctttactatcgagaagatttacatcaaggatgtttcttttgaggcgccgaattcaccggcagttttcaatgaggctggccaaccggaattacagctgaatctgaaccaaagagtgcaacgtctaaatgaaaacgccttcgaactggtgttacatgtgactttaacctgtactgctgcaggaaaaaccgcttatgtagttgaagtacagcaggccggtgtgtttggcctatttgggttggatcaacatgcaatcggtgtgttacttggcacccaatgtccgaacattctgttcccttatgtacgttcattggtgagcgatcttatccagataggtggtttcccaccattctatttgcaaccaattaatttcgacgcgctgtacgctgaaaccctccgccaacgtgctcaaaatgaaaaggaaggttcgcagatcagttcccacccagctggtaacgcttagttttggtgaatgttacaaggatgatcgattctaagcagaaaattgctgttcttggtgccggctcttggggaactgctcttgcagcattggttgcaaggcatgcctatccgaccatattgtggggccgtgatgtgggagtgatacagagcatcgatatccagcgccagaacttccgttatttacctagtattatgcttcctcagacgctgcgtgccactaccgatttggctgcagcggtctcaggtgccgactgggttttggtggcggttccctcttacgccttcactgaaactctacgtcgattggctccattgctgtcaaccggcgttggtgttgcttgggcaaccaaaggatttgaaccggggtctggtcgtttcctacacgaggtggctcgtgaaatcctggggggtgatgcgccattggcagtggtgacggggccttcttttgctaaagaagtaactctgggcctgcctacagcggtcaccgtacatggtgaatatgcgcgttttactcagatggtggccaatgcgatgcatggcccgatgttccgtgcctataccggcaacgacgtgattggtgctgagcttggtggggcaatgaaaaacgtactggcagtggctattggcgtggctgatggcatgcagttaggcatgaacgcgcgtgctggtttaattactcgtggactgaatgaaatgttacgtttgtctgcggttatcggtgctcgaccggaaacgctaatggggttggctggtctgggcgatctagtattgacttgtactggtgatttgtcgcgtaatcgtcgcctaggcttcgctctggggcgaggacagagtttgtcggatgcaatacgtgagattggtcaagttgttgagtctgtacagacttccgacgaggtaatgcgccaagctgaacagcatggtgtcgagttgccgatttccgaagctgtgcgtgctgttctacgtgaagagataactccatatgctgggatgaaagccttgcttgcacgagagcaaaagcctgaatatcttgatattctgtttaaggcaaactcttctttataagattggtcactctagctttaagcgggggatcatggacctacacagcccgcctatggcacaagcccgatccatcggatcggggggtgatatgtgcgaaggcaagtagaaatgtactactgattaagttaagaatcaggctaccaggtgaagcgtgggccgattgaccactctttggcaccttgcttgccaagcttcatttcgccgttcagcgcccaatgtccatcaaaatttacttggccgccaaggagaccatagacctggctgtctcgtttcaggccgtcctttctaaagaatctctcataaccagctagtgtatatactaatgcatgatcaccaaacgcagtgttcaagccaacttcgggattgatgccattagaattcgggtttgagccgctgagattgatccttttataggcgatacgggctaagagatcactgtgatcagcgatggaatagttatagcccaaacccaagcgccactgttgctgtttcagatcaatgctacggaacttttgtttattgtagtcaccgaacacgctccaattcggttgaaaggcgaaggagccttttaaggcccaacccttggcgttttgatcggctttcgtccttacgtagtcaccctcgacatagttgtaagacaaaccttgagcagccgaagcgacgaatggaatagctgaaagaaggctgagagccaagacggaagtcttcatattgattacctgtgatttaaaaggtgatgtagcgaactaaactcttattttaacgtcatttaacgtcagcgcctaagtgtgatatttatatatataacagaatgcaaatcgtataagttgaaaataattaagtcaagtttttgatctcatgggatcaaaattagattggttgtgatgtgttgtatactttacatacaatttactgcatctcaaaatattaataattaaatattaatggaatggcactgtcgacttgacagctaatcgcaattgttttagagcgccaaattacttagaaagtgaacctatttttcaggttgtaagatcctgtccagtggatatggaaaatcaaaggaatcaatctggaattttcttgttatctgtgagaggtaacttatttcgactgcattcttcctagaaactctctacagcgaaagttacctattcttcgttgcacaaaataattactgtgaaatacaagttttctaaataagaatcggaattatctcagcaaaaagtatgatcaaaataatcaataatttccgctgtgccattaatgcaataaacgattttgttacaaaatttatgctgtgattggagttttgcaactgagaagaagaacatcctattctgctttatcaaaatcatttcgaggaatgcgaagtgatcaggtaaatggtatgaagaaaagataatgagggacttgcttgctatgaagtacgtgatagatcacatgcttaatggtgagtgctgagtgctgagtgctgagtgctgagtgctgagtgctgagtgcttcatcagtcttgtgctgtcacttctcactgcgtacttacatgtagagaagcgttccctattcgtcgctctgcattcgttgtttctcgtctccactgcttaaagtaaacatattattaattttagcttgatggacagattcgtttgactggaagagagggatggcaaagaagctccctctcccgattccttatcaaggcagcaagcgaatgctcgcgcctatgatctatccattgctcccttcagatgtcgtctcgttttatgaaccttttgcgggatcagcggcaatgaccttgtttgtggcacatcatggggtcaccaaacggtatgtattgggcgatacgcttgagcccatcgttgatctttgggcttcaattattgagcagacttctaaaaccgcaaaaaggtattcgcaggtttggcatgggcaaacgaccacttcaacggactatttcaaccgtgttcgtgaacgctataacaatgagaaggatcccgttgatttgctgtatctggtttgtcgctgcgtcaagagcgcagtgcgtttcaatggaggagggtggtttacccaatcgcacgacaagcgtcgtctgggaatggcgccagataaaatgtctttagcaatagagggggcatcggctctgcttcgcggtaagacgaagtcccggaaaggaggttggttagaaatcacttctgatgcgacagcacgtgatttcgtttatatggacccaccttacatgggtacaagcatggggcgcgataagcgctatcaccagcagcttatgcttgatgatctggtcgctggtctcgaagcgatgaatgcgagagatatacgttttgcgttgtcttacgatggaatgactggcaaaaaagagtatggaccagaacttccggcgaccttgggaatggctcgattgctcctacatgcaggtaggtcaagccacgccacgcttcaggggaaagtggaaaaaaccattgaaagcctttacctgacaataaagtgttttgatcgtcagaaagatctgtctcaagtcctggggctgtagctttgtagcttgtatttgctgatctctgcaacagccatttcctcgcgtttggcctaatgctggttcattaatttgtaacaaagggcgacgatgcgaaggtctattctagttttgctgcgcatggggctcatgctgagaatacataaattatgcctgtccagattgagacggagggtgtatgcctaagagagttgctgaaggtttattgcgtactgctgaagaggtgctggcgcaactaagtgcaatttatgtgcaggtggcataaatcatgccacctgcacatataggtaggtgttttcgggggcatagtaccgtacccgtcaaggcatcggcgcggccaggtaaatgtgccttacagagctgctataaccacctttctgctttggagcgctgcatttcaagatattgaggctagatcgcacttctttgagaagctagtgagtgattttgagttgcgacggtgttatagctttgaagacgcagattctaaatttttattatttaaactggtcgcttgaaatcatcattcggcttatcaagcttcttcatcgctttatccacgtttttcagccgtttttgcactcctttgacgtcctcttctagcgcaagatgctctggccctgggccgctgttttcaatcatcatgcgtcgaacctctgtaccgacctgttgggcagtgcttgagagtggttgtagtcctttcacatccttatttctgatacgggccgctgtttgcgtcacgcggaataggttacctcccagctcttctaagcccatgaagtcgtacagcgtcttgccgttcggtaggcgtttatagcgctgcaactcccgtaggctcatgttatacatgctgcggaagcctgcatccttgaagatgattccaaactcggcattttgtagcccaccccaccatctttcgccgcgctagtcattgccttctcgccgaacttcagatcttcgcgggtttcgagacgtgccaagtcttccgactgaatgcgttgttcaatgagcgtgttagcgatggcagcaagaatcgtcttcgcccgagccacttcaggtttttttgagtccgcagtcatggacacaagaagacatgcgaagcggctcaactgatacgtcttgattgctttgccatcttgcacgatttcctcacgaacgaatgcctccgttgggtcaagccctaaccgactacacgcccccatcgccttggtgatgacgttttggaatgcttgccacgattcgtagcccagccattgcatgagttggtgggcgtaccaaaaatgtgtttcgccttcttggccaccgttttcaaatatttcgatggaaagattactcatttgaagtctcgtgatgtgctgtttactctttatgaataggacgttacggcaagtcaaaagatgcggcgtatcaaaatgagaaaggccgcctcaatagacgaccttctcacaatacgcccagtacatcggatgtagcaggctttggaacaatgcagcttgagaatggcttagccaaagccactacctattggataactggcggagagagggggattcgaacccccgaagcgcggtttagacgcttacacactttccaggcgtgctccttcaaccactcggacacctctcctgaatttctaccaagcatgttacttggataaaagcggaggaatcttagcgccgcttagcattcttcacaagtttaattacgctatatatggtccctgcatctgagcatggcacaatggcaacccacatgaagatgatcgcctaatgtcctatcttgttcttgctcgcaaatggcgccccaagcggtttgctgagctggtgggtcaagagcatgtggttcgtgcgctgagtaatgcattggaaagtggccgtctccatcacgcctttctgtttactggcacccgtggtgtaggcaaaacgacgattgcgcgtatcttcgctaaatcattgaactgcgaacagggtaccagtgccgatccatgtggccggtgtacagcctgcttggatattgatgtcggtcgctatatcgacttgctggagatcgacgctgcctccaataccggtgtggatgatgtgcgcgagatgatagaaaacgcgcaatatatgccctccagaggcaagtttaaggtctatctgattgatgaggtgcatatgctctctaaagcagcgtttaacgcgctgctgaagacgctagaggagccaccgccacacgtaaaatttcttctggcaacgactgatcctcagaaattgccggtgaccgtgttgtctcgctgcttgcagttcaacctgaagcgcttggatgaggaacagatccagcgtcaaatcgccaagatcctcactgctgagcagatcacagcggacgatgcggcgatcatagagctttccaaggctgctgacggttcattacgcgatggtttgtctttgctggaccaggccattgcttatgctggaggggtgttacgcgagggtgcagtacgtgacatgctcggtacggttgatcgtactcaggttgaggtgatgttggctgcattaatcgcaggtgacggtgatcgactattgcgggtgatagcaaccttggctgagttttcgccggactggggcggggtgttggaggccctggctgaagctttgcacaggattcaggtacagcaactagtgccttcggtggtgtttgcaggtgatggattaaatgttgccttattggccgaacaaacacagccggaggttgtgcaactttggtaccagatggcaatcaatggacgtcacgacttacatttggcaccgagtccacgtgtaggatttgagatggcagtgctgcggatgctcgctttccgacctgttcctgtggttgcaccggatctgatttcggctgaggggcatgggcagagtgttgatgccccactaatggcgtctgttggtagggatgcacatggggctaatggatatacgatgtcccaatcccgttctgatctccagtctgccttgctgcagacttcgattgcggtgcctccaatgggaggtgatgacattcgtatgggtaagtcgtcgttattacgcagcacagcggtagcaccgcatcagcttgagaatgtgtcggtgtgggctgagcagtctgtgctttcttcttctgagggagcgatggaacgtgtcccgctaacaactgaagtgaataaagtcggagttggttctttggatgggaagatcactgatgttgggcaatggcttgcgttggtcgagcgcattgagttaagtggtccttctaagcaattggctgctcatgccgcttttgtctctcatgagaacaacgtcctgtgtttagcgttagatccggagtttgaatatctacaatcgacacgttctgtggccgatttgacccaggggttgacccggttgctgggtcaggcccccgaagtgaagattgaggccagaaacattcaagttgaaactcttcatgagcgcacctatcgtcagaagagtgagcgccaacagttggccgaagaagccttcatgagcgatcatgtggtgcagcatctgatctatcagcaggctgccaaagttgttaccgattccatacgcccttacgatgagtaacgaatgatgcgaggcaatattgcccaattgatgcagcaagcacagaagatgcaggagaatctgcagcgtgctcaagaagaactagccaagttggaggtcactggtagcgcaggtggtggcatggtgagcgtgatcctcagcggtaccaaagagtgtcgcaaagtacgtattgaccccagcatattgaacgatcaggaaatgattgaagatttgatcgcggcggcctttaatgatgcctccaacaaggtagatactgaatctaaggaaaggatgggatcagccactttgggtatgtcgcttccgcccggttttaagttgccgttctaagcgtatttggaagggtgtggggtcgatgctttgtgtaggaaggcatagcgcggtttgcgatgttttattgcaaacgatgcttgtcctttttgtatcctttatccgcctgtcgtaattaacagagtttcagagtttacccgcttgattgttggcttcttgggcacgtcttgggcttgggatcgtaggcatgttatgagtacacacttgcttgagcagttaattgatgccttccgtatcttgccaggtgtcggtcagaagaccgcgcagcgcatggcctaccatgtgctcgaacgcgagcgtgaaggtgggcagcgcttggctgatgtgctgagccgtgcgattgaaaaaattggtcattgtacggagtgtcgtgacttcagtgagaccaaaatctgtgcgatctgtgctaactacagccgtgaccgtcatcagttgtgcgtggtcgagtccccccctgatcggctggcgattgagcaagccactggctatcgtggactatattttattttgcaggggcgcctgtccccgctggatgggatcggccctcatgaacttgggttggaccatttgggacaacgtcttgctgcaggtgaggtgacggagctcatcattgcgactaatgcgacggtggagggtgagacgacagcgcactacttggcgctcctggcgcgccaacacggcatacgccccagccgactggcacaaggtttgcccttgggtggggagctggaatacttagaccgcggcactctttcgcatgcgttcggcacccgtactgaagtggtttgaaccacatcaaagcaccctaaggcgttaagcttggtgtattcctatttctgtgagtgtctgtatgtctgaagagactatcttcgctaagattatccgtcgtgaagttccggctacgtttgtctatgaagatgaggaagtgctgggtttcaaggacatcatgccgcgagcaccggtgcatgtattgtttattccaaaacgggagatgatcccaactttggatgacttgcgcccagagcaaggcccattgattggcaagttagtattggccgcagcagaatacgccagacgtgagggctttgcgcaggatggctaccgtattgtcatgaattgtcgggagcatggtgggcagacagtctttcacctccaccttcacttacttgctggcgcgccattaggaacgtggtaatgcttgaaatatgcgccgctttggtggtcagcggcgcgcttcttgctctggagtgggtagctccctttcaccaccaccagcgaggatagttccagccccatggacccggtggtccccaagggccatacggatagatggggacaacctcaacatggcgtgtgactggccataaatagatcacatcggcgctaactttagggagtttgtaatcgtattcgccgatgtacttattttcgtagctctcgattttgccgatgaaagtcacttcacggccaggcgcgaagatcgctggatcgtaaaatccgctacggcaggcgataaaccgaccgccattggtgtcgccggtatcactgtccggacggcctgatggcccgagctgtcgtgagagcatctcgaagcaagtctggctatgggagggtatggtcttgataattttgccgccccatcggactgaactaccgatttggggattggtgacagagtcacttggtgtgattgcgctgaattgtccttgaagtggttttggcacggtcgtgcaagcagccaacatcaagagaacggtgaatggaacaagtaaacgtgttctcaatgttggatactgcggtatgcgggcgatgttgcaacaaagcattgatgagattcctatcaaaatctttggaactataacgtgcattagtgaaacgctggctgagtatatataagccgatgccaggatactgttgttcgattcgttttgcccaaaccagtgctggttcgtgccttttacgtcctagccccagacgcgcgtagtggcgatcgagccgatgccaagcgcgtagtagcgcatcgcgttctccctccccacgggccagccaccatgccatcaagcccagtgatactgatgtaaatgcaatgaacagcatcatcagttgcgatacatgcagatggtcgatgccaaatgagtgcaacaattgctgctggcgtttggcatcaaaacccaataccaaattgttccaactgtgtcgcaaccagtctccgatgtcagccaatctccagtgaccgtctatgctggcatcgttgttgttttgtgctaagcgatcttccaacgtatcgcgaatgcgttcaggtgccacagcggcggttgggtcaactcgtacccagccacgttgtggtagccagacttcagcccaagcgtgcgcgtccatacgccgtatcacccaataatggcccaaattgttatagatgccaccgacatagccggtgaccacgcgtgcaggaattcctgaggcacgcatcaatacgacgaatgaagaactgaactgttcgcagaagcctgctttgtcgcgaaatagaaattcgtccacggtgtgaagcccaggccgttctgtggcggccagggtgtaagtaaattctgtgcgtacccagttcaaggcgcgctgcacaattgctgcatcgtcagtgccggcttcctgtcgccattgcgcacccaatgcgactgtacgtggattcaatctaagaggaagagcaagtgcgcgttggcgctgtcttggtggcagtgtttcttgaaaacgggctggtgatgctgattgcaattgccagcgtgtgattgcacttagggggcgatcagccaccaagctacgttcgatggtgaggcgtgtgcctgcaggtgcggcgagtggtagatccagtgcgactaagtacttctgatcagtcggttcgtaatcgatccggtagttgaagtgttgcgtcactggcacaaatcctgtcggtggtattaaagaagcggcaaacggtagtgcttgccagctgcggccatcaaagtcccacatgactggccctcgccagtaacgctgccccgctggtggtgttgggccattgaaactgacccgcagcgctggggtttcgtcgctcatcagatcgatccaggcaccgggtgccatgttgtctgagagtccaggacgtacttgtgcgtgctcgggaacaccccatagcggcgcatccaggcgtggcagtagccagaatcctgctaaagtgagtggcactcccagcatagtaagttgtccaatgctcgatagttgggaacgtactagacgtactggaacctggctttgatcttgcgttaagcattgcattgacagcagtgtggcaggcacaacgagcagggtgagtaccatcgttgccggcccttggtcgagtatgagtgcggaaaacggtgtgaacaacgcaaagcccagtagactgcgtgcatcgcgcacgctgtgtaattctgatgttttgagtgcgatcattgctgccagcaccgcacatccagtatcccggtcaaagcgtatttccatttgccacgacaccatgccgagcatcgttaataccagcaatagccgcacaggtgcccgaagcgttttgcgccaactgagtgcgttaacggccagtgcgatcgccacgatgcctagcgacagtagagcaggtatctgtagtaataacggtatcagtgcgagccaagctgtgatcagcacacagacacggcttgtgaaagaaggcgaatccggtttagacatgtggtaagagggctaggaggcgcaagcagcggtggtgatggacggcaccgtggccatagtccaattcaggatgacctggaagagacaagcaatagcgccatccttcccgctcggcttcgttgatccaacgcgtcaatcgtgtgatgcgatgctcgtaggggagggtgtacagctggttccaatccagcaacacttccaatgcggcaggttgttgatattcatggactaacagtgcgctgcatcgtgctgagtgcttccaggcgatggtacgagcagaatcaccagttcgatacgagcgtaattgatgcatttcttcactctgtgagctgtgtcgccaccgatgcgccttattgctatcgctgatcggaggcggtggaccgctttgctcggcagttgggtacaccagcagcggctgttctggccatacccaggaccaagccgtgatcaacccgagtggttgtaccgtggagatccgaatacgtgacaagctgcgccagccacgctgcctgctagtgatcttcaagtcgacttcgacagggacccctggaagcagcgagcaatacgtctgtgcgtcttcatgcttaagctgcagtccgggacgtgagcgtagctgggtgctatccagcagaagtcgcaattgcagtggttgccccgctgcggctggcttggatgggagtatttccaagcggagtccagcaagctgtaggtgcgtggctaatgcactgccaatgccagctccactgagcaggagtgccaataggagtgtcatgttgttgttgtagttcagtcctcctgccagcatcgctagcatgactatcgcgaagaatagcccgaaaggagtgggcagcatgtaaatccgctggctatttagtgtgaccggcatggattcaggagcacgcgggcgtgccagcatcgcagcgcgttgaatccagtggcgtaggaaggcacgcacgctcaatccaccggtacggtgtatagcaatgtttgagccagcgctgcaccggtggaagatgtttcagcctctggcacgagacggtgtccagcaactgaaacgaatagttcctgaatgtcttcagggagcacgtgttcacggcctgacagcaatgcgtaggctttggctgcacgtagtagggcgatgccggcccgtggtgataagccgacacgcacgccactttgctggcgactgcgcagcaacagggcttgtacgtattcgatgagtgcatcgctgacgtgtaccccaagcaccgttttgcgcaacaagatcacgtcggcttctgtcagtcgtggcaaggtatgggtcagcagctcccgtcgatccatgccggagagtagagtgcgttccgcctcggcgttggggtaacccaggctgagtctcagcagaaagcgatctaattgcgaatccggtaatggaaaagtgccgtacagatcgacaggattttgagtggcaatcacgaagaaggggtccgacagtgatcgggtgatcccatcaagggtgacttgttgttcagccattgcttccagcagtgcactttgtgtgcgtggcggtgcccggttgatctcgtcggccagcaacacatgggtgaacacgggacctggatgaaattcgaactgctgagtctgcgtgttgtacaccgatattccgagcacatcagcgggcagcaggtcggaggtgaattgcacacgtcggaacgtcagccccaagcttgaggctaaggcgtgcgctagggtggtcttacccagaccggggagatcttccagtaataaatgaccgccagacagcagtgcgacgaaggcaagacgtacttcttgctctttccccagtaagagggtgttcacttgattctgcgcttcgtcaagcgagagacgtagcgtatcggttagcattccttgagttgacgatgtaggcattacgatccaatgtctaaagaaggggtgggggtcatccaggaagatcagcgtgcctatcggatatttgtgatcctgtgggcgctggtaactgccctcaaagtagtgattgcggtgcggttgccgctgtttgttgacgaagcattctattggcaggaaggccaacattttgcattagcttattctgatcttccaggcatgacggcatggctgagcagattaggtgtcatgctgggtggctatcatttgctggcgttgcgcttgccatttttgctgatcgccgcactgttgccgtggttggttgcacgtattgccgcgcgctggtttggtcctttattgggttggcgtgctggcttgctggtcttgttaatgccgttatcggccacgctcggtattctagctcttccggatgtgccgatggcgttggctgtggtgctttgcctggatgctggggcacgtctgttgcatgagatcgatgcgatcagtgttctggaattggcgactggtttgctgttgggtgcgttgagtcactatcgttttgtcggtgttatcgggatcggattaatcgcgttgttgtgtatgccacagggacgcgccttgctgcgtgacccgaggctatgggtcgcactgattatcggtgcgttgggttggttgcctctgttgctgtggaacgtcgacaatcatgaggctggattgcgtttccagtttattgaacgtcatccatggaatttccaagccaaaggtgccttgttcttactgatccagacactgttggtcacaccgttgcttgcttatgcaatggcgcgggtggcttggcttgccgtgtatggcaacgagcgtgttcagtggcgttatttcggtttgctcggtggtatctccactgtggggatctttttgcttgggttctttaccgataatgagcgcgtcagttttcattggactctcccaggctatttcgctttgctgatcgttgtgccgcaggtactgatgggctggcctcggcactggcggcgcgtggcctggggaatggcggtgattgggggattcagtgtctacgcttattactttgcggtgtctgtgccggggttgcgggaactcagtgctggaatggggtattacccacgcaattttgctggttgggatgaactcgctgaggcagtacgtgctgaactgcagcagcagccaggtacacgtatcttggcgggtaattttaaggtgggtgctgaacttggtttccggttgcgtgatccgcgcattcaggtcatgccgtcttcagtgaatgatcgtcacggacgcactgcacagatacagcagtgggggttgttgaatcagagtgcaggtgaagggcggcgcctattgatacttaatggtgtgcgttaccgtgatttactacaacattatcatgaagtctgcgcgatggtgggcccattgccgccgccacgcgttgtttcgatcgatcatggttaccaacgtttcttattgttcaggttgcctacgcagcgcgtgtccggagaatgtgtgacacctgcaatggcttggatcgatcagccgttgcccgatgcagtgctatcagatgcagtcgaggtgactggttgggctttcaaggatggtgtgggtttagcgggagtggatattttgcttgatggtcaggttgtggttaaggctgattacggtctgttgcgtgacgtgcgcgattactggcgtatctcgacggatcccaatcacccagatgtgggttttcgtgcacaagtgaatttccataggttacctccggggcggcattggcttgggctacgtctctatgggagtgatggtagtgtcgaagattggacagagcagccgttgcgcatctgtcgttaatacaaagattgtttgagcctgattgccctgatttgacaatgcttgcctctatccttaggattcggttcctcatgcttgaacccgcacctcatgcttgaaaacgtgccggagtggctggatgcttggcgcactgttgctgcccgtgggcgttttggagggcagattcccctaaataagatgcagcggcttagggatgcgttactcgatagcgaaggtgagtgtgcttacctacttgagttcggttatgatgaagagctgcgagtcgcttatgtggcgttgactgtggaagcacagttgccgcttgaatgtcagcgaagcttgaggcgttttctgtttccagtgcgtgttgtccagcgcattggcctaattcgcagtgaggctgaggagtcgacactccccccggattacgaggtatttcttgtgcctagtgatgccgtgttgcggcctgctgattttgttgaagatgagctgttgttagcaatcccattggtgccagtggccccagatacagaagcagtggaaaccaaatggccacctattgatctagaaacgaataagatcaatccgtttgcagtgttggcctcgtttaagaagcaatagtcatcgtgaaaggtttagggcagaaaatgaatttgaggcgtatttgaatttgatacgtgtttttttctgtgcaatgaaacaataaagtgatagcaataaatttggagtattcctatggctgtgcaaaaatcccgggttaccccttcccgtcgtggtcagcgccgttctcatgatgcattgactgctaaaaagttgtcgattgatccaacgagcggtgaggtgcatatacgtcaccacgtgactgctgatggttactaccgtggcaagaaggtaattgcgattaaagcttcggtcgtcgaagaagattaattgaagagtaaaaaatcctacttgtttactgcatgttctttgaaagtcgcgtccgtcccggcgcggcttttttaataaatttaggaacttcgatatgagcaagcggatctacgctagaatcgcaggcacaggcggttatttgccggaaaaagtgctaactaatgacgatctggcccatatcgtcgataccagcgatgaatggatccgcactcgcactggtatccgtgagcggcatattgctgccgaaggcgaaacgaccagcgatttggcttatgaggctgcgatatgtgcacttgaagctgctgaggtgcggtccgctgatttggatttgattgttgtcgggaccacaacgccggacttgatttttccgtctactgcttgcttgttacaggcacgtctgggagctgttggttgtggtgcgttcgacgtgaatgctgcatgttccggttttgtatatgcgttgagcgtggcagaaaaatttgtgtcttcgggttgctccaaaacagtgttagttgtgggggccgataccttgacccgaattatcgactggagtgaccgcacaacttgcgtactattcggggatggtgccggggcggtggtgctcaaggctgatgaagatacagggattctcagtacccatctgcatgctgatgggagcaaaaaagaattgttgtgggatcctgttggtgtgtcagttggttttggtgaaggcaaagattgcggtgcgttgttgatgaagggaaatgaggtgtttaaatatgccgttaaagcccttgatagagtggttgatgagacgttggaagcgaatcatctggataagcacgaactcgattggttaattcctcaccaagccaacttacgcattatcgaagccaccgcaaggcgtttagatatgtcgatggatcaggtggtggtcacggttgatcgtcacggcaacacttccacggcttcggtgccactcgcgcttgacgaggctatccgttctggtcgtgtgcagcgtggtcagttactgctcctggaagcattcggtggtggttttacttggggatcggcgttactgcgctattgatccaattcgccagcgtttttgggctgggacctttatcatggttaacggccactaatcaacaatgaacaaatgtccagggaatgtttagggcgagttccgcaattggatcatggccatatcttttcacctgttacttcggcgcacgacacctgagcactgcgttcactattgaaatgatcaaaggttcattggataagcatttcatttcgcttaccacctggatcatcaggcactatctgtcattgagagtgtggatcgccgactttcttagagctgaaaagcgcaaacctggatcacggggcctgctatcagtacaacgacattgatgctttttgtaggaaatcacttgtagccatagctaccattaaaaatagttactttaatgatctcaagggtttttcaattcttgagggaagcccatagagcttcagttggtacctgaatctctatgtttcggagatgaactatgatcaagatgtgtaatgcgtcgcgtcaggccagtgctgtgttttgtttattttgcatattttcggggttacgtagcaaacggttggcgacgtctagccaagcgagcgcactggcttcgataatgtctttactggtccctgtaccttcgtactgagtatcgttgtggcgtacactgaggttagcttcaccacgtgcatcggccccgataccaacactgtgtacctgatagctgtccaactccagtttgaccccggttgctgcagccagcgctccgaacagtgcatctactgggccgttgccttgcgcagtttcggccacacgctgaccttggggatcggacaattccaccagtgcgttggcccggttaccaatatcactgattgtcattgaggccaagcgatagccatgctgtactgttgtatcttgcatcagcacttgcaggtcgacatcggtgaccaaacgctgtttctcacaaagctgtttgaattcttcaaataccagttttagatcttcttcctccagcaagtagcccagtgcgcgtagacgctgttcgaccgcagcacggccgctatggcggccgagcaccatgtgcgaacatacccaccccacttcttgtggacgcatgatttcgtaggtgccgcgatggcgcagcataccgtgctggtggatacccgactcatgtgcaaaggcattggcacctactactgccttgttacgttgcacgggcatcccaaccaatcgttgcagtaactgggaggtggagacgatacgtgatgtgtggattgaagtatcaatgttgtaaaacgcgttgcgtactttcaacaccatagtgagttcttccagcgcgcagttaccagcgcgctcaccaatgccgttgatagtacattcgatttggcgtgcaccgccctcaatggctgccagcgagttagcaacggccaaacccagatcgtcgtggcagtgcgcactaaagatcactttgtttgcaccttcgacgttcgcgatgatgcgcgtaaacatgttgcggatttcttcaggggtgctgaaccctacggtgtctggcaggttgatcgtggttgcaccagcggcgattgccacgcgggtaacctctatcaggaaatcctcttcagtgcgcgtcgcatcctcggccgagaattccacatcgtcaatcaaggttcgactgagactcacatgcttgtgcactgactccagcacctgttccttgctcatgcgtagcttgtgctcgcggtgtaatgggctggttgacagaaatacatgcaagcgtggttttgttgctgattctagtgcgcgtgctgaagtttcgatatcggcttgcagacaacgtgacagtactgccagagttggtctacgtaactcgcgtgcgatcagcgtcatggcttcgtagtcggattgggaactggctgggaaaccagtctcgataatgtctacgcccaatgcatctaatgcgcgcgccatgaccagtttttgttgtgcaggcatactgcaaccgggagattgctcaccgtcccgcagggtggtatcaaaaatccggatacggggtggctggctggatatgctcgtgttcaccagtgaatactcctctacagcagtgctattggcaggcgtggatatggggtggaatcagttaaaagggagcggtaaattgccgcaattgttggggcgatctgcactacgcctacgtggtttgcggggtggccgtggtcttacttcggacaacagtttggccagtactgcagcgtcaatattacctccggagaccactgcacacttgcgcttacctgcaacgcggcggccagcggccaatgccagtgcgcctgccccttcggcgatcaggtgttcttccaatactaaacgcaccaatgtttcgcgcagttcagcctcacgcacgatcactacatcgtctaacaagttggcacacagacggcgggtaatgaaaccaggaatcttgactttcaccccgtcagctaaggtcgaaactggagcgatctcgcgtgtgtcgccacggattgcacgcgccatcgcatccacgccctcgacctgagcgccaatgacacgtactccctgcgagcgcagcaccaaagcaatgcctgaagcaaggccgccgccgccgatcggcacgatgactacatccggttcatgcgcggtgatctctatgccaacagttccctgaccggcaatcacatccggatcatcgaatgctgatagaaagtggtaatcgttttgctcagccaactcacatgcgaacgcataggcctcgtcatagctttggccgtgttggcgtaccgtcgccccccaatgtgagacacctgcaaccttcgtgaccggagcaccgtgaggcatgacagtgattgcttgtatacccagccggtaagctgaccaagctacgccttgggcgtggttaccggctgatgcgcaaatgactgggcggttatcgccgcgttccagcgcaactaacattgcgttcagcgcgccacgcactttataggatccggtgcgttgcagattttccaacttcagcatcactccgaaacgctcggcatagtgaattggggtaggcattagataacgacgtaagcgggcttgtgcagccaacacatcggccacactcacggtgttgacgttacttgcattgggttgcttgacaacggtgtgacctacatcaggtatatccatagagctatacgtcctgatgatctgcacacatcctgatggcatgccatgctgactcgtgcctgctaagaaaatccagcggcagtattgcacgtggtatatcgcgtcgtgcggtgcagttcatgcggcttccaaaacagtaatagatactgattcgcagtcgtacactttctccagttgcaaacgcagcgtctctggtgagcgcgagccgtccacaaccatttgaagatgccaacggcccgcatcgttgacgacagtactgccgtggatcgcgcaggcgcggaagccgcgacgttcagtcatgcctagcacacgtaatactgcaccttcggcgggtctgaggatcagatcaagccggtattgcatggggcgcttccttcttaacgtgggccggattgctttccagcatggtgctgttggcggtgttcggtggcacaaggggccatacgttggcgcgtgcatcaatctgcacgtgcagtaatgctgggcctggttgtgctagtaaataggctaagccttgttcgacgtcgctgcgaaccgtgatgcgttttgcaggaattccaaatacctgtaccaatgcagtgaaatcgggattgtcagacaggtcaatttcactgtatcgctccgcaaagaacagttcttgccattgccgaaccatgcctagcgagttgttatcaagcagtacaatcttcaaaggtagcttgcaccgtgcgattgtggtcagttcttgtacattcatcatgaaactgccatcgccagaaaccagtactacagtgcgttccggataggcaaactgtgcacccattgccgcaggcaagccgaaccccatggtgcctagcccaccgctggtcaggtgattacgtggatcttcgaatttacagtgttgcgccacccacatttgatgctggccaacatcgcaagcaatgatggtatcaacgggtgccatttcgctcaggcgtttaagtagggccggtgcgtagatatcattgcctggcgcatcgtaacgcacgccaaaacgttcgcggttgcctatgcagcgctcctgccattcatatctggatgagcttatgtgtgggtgggctgtactgggtgacagcaaggcgctaagggcagtgagtgttgtggctaagttgcctggtaccgcgatgtcggcattacgtagcttattgatttcgtaagcgtctgcatcaaggtggacaattcgagcgaacggagcgaattcgttcaccttcccggttgcacggtcgtcgaaacgggcaccaatgacgagtagtagatcgcactcctggattgccatgttggccgcgcgggtgccatgcatgcccagcatgcccaagtaatggggatgagcgtgtggcagcgcccccaaaccgcgtagtgtcaacgtggtcgggatactagtggtatcaacgaaggtacggaagacgttaactgcatcggcgagggcgatgccgccgccgccatagatcactggtttctcagcagaggcgattgctgctgcagcttcgatgatcatcgctgcttctgcttgcggcggtgccatcacggcggccgacacatggtcctgtaggtgcgaagcatcagtcatttggacatctttaggtaaatcgatcaggaccgggccggggcggccttctcgtgcgatacggaatgcgtcctgcaccatgcttggcagatcctgtatcgaacgcaccaagaagctatgtttgacgatcggcatggttaggccaaatacgtccaattcctgaaatgcatcggtccccagcaacgagctagcgacttggccagtcaagcagaccatggggactgaatctagcatcgcgtcggcaatgccagtgatcagattggaggcacctggacctgacgtcgctacgcatacaccgacacgtccgctagcgcgggcatagccatttgcagctaaagctgcaccctgttcatggcggaccagaatatgtgtgaggcgagaatcgaccagggcgtcataaaacggcatgatcgtgccacccggatagccgaagagtgtatcaactccttctgcttccagagcatgcgtcaaccagctcgcaccattgcgggttgcgctgtgtgcggatctgttcatgtggtagcggccttatatatgttgcagtgagaggagggcggaaggtttaaaccaccttcgaactcatgggaggcgttgtgtcatttgttttttcgctgtttaaccagaccatcttggcccgcagttgcttaccgactttttcaatggggtgttccaggtcggcttgcttatatttcttgtagtttggtaagccggcttggtattcggcaatccaatgtttggtgaaggtgccatcttggatatccttcagcacagctttcatacgttccttggtgctgccgtcgatcacgcgtgggccactgacatagtcgccatactgtgcggtttcagagacaaattccagcattcgggtgatgccaccttcgtagaacagatccacgattaacttcaattcgtgcagtacttcgtaataggcgatttccggctggtaaccggcttcaaccaaggtttcaaagccggcttgcactagcgaggaaacaccaccgcacagcacagcttgctcaccgaacaagtcggtctcagtttcttccttgaaagttgttttgatgatgttggcacgggcaccacctaggccaccagcataggttaaagccagctgctcggcatggctgctgagatcttgatgtactgcatagatacatggcaccccacgtccgatttcgtattcgcggcgtaccagtgcaccaggacccttgggggcaacgagcaccacatctagatcgctccgtggggtaatcatgccgtagtggacgtttaggccatgcgcgaataataggcaagcaccttgctttatgttcggtgctaaaacctcttcgtagagtttcttttggaccatgtctggggtcagtacagcaactaaatcggcatgtttcgctgcttggtccggagactgcactgtgaaaccgtcagcctgagctttagcttcggttggtccacctggacgcaggccgatgataatgtcaaaaccagagtcacgcaggttcagagcatgtgcgcggccctgacttccataaccgatgattgcaattttcaaagtggacgttgtatttctcataaatagcatccttgaataatctgtggtgatggaaacgttaaccaacagtgcatatgttggctgtttattaaggtctgagaacgaggtgcgcaacgtatggaatctacggttgccatcgtattctggtaggtacgacagagggttttttcatcggatttggtacttttgttcatgtcatatcgaaatttttaggggccatactaaaaacaaaaccccgcaaggttgccaatgcggggtttgatcaaagcctgagtgtatgttgtttacacgctggcctgtcccccactgcttgggcaggcaataagcacgagtataagaagaaaggctaccgtaatagcagaattgggaagacagttggaagaagctaggaaggaaatcataggtgggagataaacattgaatggcggtcctgtcaacccttaaggccgtccgcgtccaattgaaaaaactgaaagttccagcactggctatctataaataaatgggagtaccaaattttaagagccgttatctggcaacgcatctaagcaagatgctggagtggggagtggagtttattgcttccgtactccagtattgtttgcaaattcaatgtgccgcttttcaaaaaggctgtagtgttgggctggtttacccaacactactggcaattcaattggcccagtgtcccggtgtggtggactgtaaaagtacctgtgccgatagtatctggtctttttccagtaggttgattgtatcggtcagaattgcggctgattcatgcaataaagggtcaggacgcttgtcggccagcttttcgcgtgcagtgtccttggcgatatcacgctcgttgccgatcaatccgtcgtcactctcctcagacaaaggatctagctgcaagccaaggtttttccgaatagtttggcgttctctatgttgagtttcttgttttctacgttctgcaagacgttcggcttcgttgagtatgacgtacttcttttccttttccagactgaaattatgtacatcctcttgccaccatttgaattcaatgtcattggcagtgcgactgatatgaatttttttcagtttcgataatattgggctgaaattgccatattgggtgtgttggagcgaggcaattcgagtccaaggcaaggcattttcataagtgctctccccaaactcagttgcacctacgcttgctgggaacgcaatgtctggtaacactcctttgtgctgggtgctggatccgctgatacggaagaattgagcaatggtcaatttgacttggccaaatcgtctgctttcgttggccggccaacgatccaggtcaacaatattttggactgtgcctttaccaaagctggtttctccaatcaccaaaccacgcccatagtcttggatggcacctgcaaaaatttctgatgcagaagcggagccacgattgatcaatactgccagcgggccgtcccaggtgactttgtcgtctcgatcaccgttgacagtgacacggcccccggactcacgtacttgcaccacaggaccttgttcgatgaatagaccagtgagctgaatggcttcatccagcgatccgccgccgttgttacgtagatcgagtaccacaccatcgactttgtcagttttgaagttgattaaaagcttcgctacatctcgtgttgcagacgtatagttggcgacgttgcggcgacgcccttcgaaatcctcgtagaacgttggcagcttgatgatgccgatgcggcgctgtgcgtcgccgttgctgccctctatggtaatggtttcgcccttcgcggcctgctcagctaagcgtaccttctgtcgtgtaagagtcacgatacggtgtgcgccgtcgattccagattcggctggaatatattcaagtcgtacctgggtgtctttcttgccgcgtatcttggagacgacatcgtcgatgcgtaagccgatgacatcttcaattgggccgcctttgccctgaccaacgccgacgatgcgatcaccgggtttcagtgtgccatccaacgcagtggggcctccaggaatcacctcacggatgatcaccatgtcttcctgcttttgcagctgcgcaccgataccttctagtgacaatgacatctgctggttgaaagcatcggctgtgcgtggagtgaaatagtcggtatgaggatcgatcgaattagtgtaggcgttcagatacaactgaaagacgtcttcaccttttagctcgttcactgtcttaagaaggttggcgtagcgttttttaagagttttccgaatgtcttcgggcttttttccggccaacttcaggcgtagccagtcgttcattgttgatcgtcgccagatgtcgtccagatcttgcgggctggctggccatggcgctttgctacgatcgtattcgtatttttcttgcccggaaaaatcgaagttttgtttcagtaactgatttgcataggtaacacgctcagcaacgcgctttttatacatcgcaaatatactaaacgctggcttgagattgccgttgcagattgaatcaggtatctcagctttgaatgctgagaagttgtcgatatcggcttgagtaaaaaattgcttattgctgtctagggcttccaagtagcgcttgaaaatgtctttggacattgcttcgtcaagcgggcgcagccgataagcataacgactatctgaaagcagaccatacaccagcttggtcgctgtggtttggtctggcgtcgccacttgaggagatgcgctgtccgatttggccatcaacgctggagcggtagtgatagccagggttagtagggcaactttcaaggagttaaggattcgtaagctcattaatttactctaagaggacaaggccgttttaggtcaagcaaattgcaaaccagactaacgccacgattgccgaaaaatatgaacgggaaggtacagggcgtaaacacaccccttatgaatcagtgcattaggtgcccatcctggattataaaactgttaaggatctagagcctcgcaattttatccaattcattgatgtatatagatttattgatcctgttgattgaaatcgcaaccgaaggcaacgtcgtcactggtgaaacagattgaagtgttgatcgaatgacgaatgaaaacagaacggccatttttacgcctgctatcaagttagttcaatagaaaccccagagatgaagttactgggattgctgcacagatacatcaaccagtaacgcgcgtttcggacagcaaacgtaccaagccctcttcaatggacacgcgcggcacgtacccgaagtcacgctttgctggttctatgctgtaccaatgaggagtagacatctgctcaacgagaaagcgcgttagcagtggttctccaaggaggggcagtaacgaccatagcatctcgcaaaatgcaccaatgcagtaacccgtcttaaatgacagggattgagtcaccggtggcgcgttggcagcggccagtagcttgttgatcaattcgcgcatctgcaacggctcaccgttggagatgaaataagccttgccagcacaggctgctccaggcataagatgctcaaacgcatcgaaatgtgcttgtgcggcattgtcaatgtaggtgctatctaccaagttacgaccatcgtcgatcagacgcagtcgcccagcgcgggcgcgcgccactaagcgcggcatcaagtgagggtcgcctgggccccatatcatgcgtgggcgtagtgccacggtggttaagtcgacactgttggctgctaacaccgcctgttcagccattgctttagtcgcagcgtatggcactttaacggcgttgctatatggcacttgatctgcatctaaaccctcaaccgggtagttggagcgatgaatcacactcgggcttgaggtgtacaccaacttgctaatgttctcagcacgacaggcatccagaacgtgttgtgtgccgatcacattgatttggtggtaactagtgtaggaaccccatgcacctaccttggcagcattatggaaaaccgcatccacaccacgcaccgcgtgccgcaccgcgtgaaaatcgctcagatcgccgcaaatctgcacaacgcctagtgcttgcagtgcttggtagtgactacgttggaaactaagtacttggtagccacgcttaagtaatcctcggcatagtgcttcgccgaggaacccactccctccggtaacgaggattttcataaaaatgtcagcattattatcagtgaagaggcaggaagcttaacctgctgtggccaaactgactgtagtgctgccaccttcatataccagcaccaacacgcaagggcgttggtgtcagggttcaacttggattgacgacgatcctggaggcatgcaagtggggatggttaatagcaacctgtttaccatcggacatactctgcgccgaccgacagtaatctcccgcttagatgcatctcgtcatgtggtttagtcaatcagaatcaaaacgacgtcgatatttccacgggttgcattagagtacggacaaacacgatgcgctttgtcaactaaggtctgcaacatgctgcgttccatacctgataccgcaatacgcagttctacgactaggccgaaaccaccagggatttcaccaattccaacacggccttcaacacgtggttccgctggtaaatctactttctccttattagcaacgaacttcagggcgccaatgaagcaggcagaataacccgcagcaaacagttgttctggattggtaccagagccacccgggccacccaatccctgtggaacggatagcttgacgttcaacacgttgtccgaagatacaacgctgccatcacggccaccagttgctgtgacgattgcggtgtaaagaaccttctccagtgaattcatgaatagtgctccagtcagatgaggtggtaatcgtgtcagaagaacttcattttttgcaatacagatgttgggtgcgatagagcggtactatgtcaacattgatgtgtttttcaataaacatcgctcagccagaaatatctcctcacttgtactgtttgtactgcggttacattagcgcaaagaaaggtcaggcacgatgtgcagtggctatatattcaacactttgcatttcatttaagcgtgaagccgtacgttcaaatgcctttgctaagcgctcaccctgatacagctgtatcggtgtgccgaatgcggtgcaaaccaagttgacttggcgatcatatagttcgtcaatcaggttgacgaagcgttgtgctgcatcctcattcagaaaattgaattgaggaatcccaccgatcagtatcgtattgaattcacgtgcgagttcaatgtagtcagtcgtactgcgtggaccttcgcataacacggcgaaatcaaaccaagcaatgcttttaccacgggcacgtgccggaatcttgcgtccgtcaatggcaatgttgccgggatgaggtgtttcaccacagctcagctcaccccaacgctgggtcaaccaagaatcggcctgcgcgtccaacggtgtacggtatacaggcgaacctgttaatgcgcgcatccggtagtcctcagtcccttcagcatataactccacgcaataattttttagcaagtcaattgccggtaggaagctatcacgctgtagaccgtttaaataaagcttgtctggcgcagtattggaagtggtgaccaggatgactccttctgcaaacaggtgttccagcagacgtgcaagtaacattgcgtcgccaatgtcggtaacaaaaaactcgtccaataccaacacacgtaaattgccacgccattcttttgcaatcttggcaagtggggcgctgtgtccgacatgcgcacgcaagcgttggtgtacaccgcgcatgaagcgatggaagtgagtgcggtacttaccgccctgggaggtacggtttgagaaagggtattttgttttttgaatattctcgttttgctgaggttcggcgataaatttattaagaggtaagccatcgtagaacaggtctaccaaaaaagtcttaccacggcctacaccaccccaaaagtaaaacccttgcaccaattttggctttctccacaatgctgtaaaacggtcccaccagcgattctgcgagctgtgaatgattgcgttatggattcgatccaattctgccaaggcggcatgttgagcaacatcgtcgttccaatggccacgttccacgccagcggcatagcgttgtgaaggagtcatttctgtcacatcaaatcctatagctgcagtatgtgcaacgtccttatggatcatgccagctgtggtaaccagctgcgcacaccatcttggatggcatcgcgtaaatgaatcaacttgcgatgaaaaaagtggctggtgtcaggcatgcgtatcagcttaggctgacgcggcaatgtggagatccagtcatagacagcttgagggtcaacaacttcgtcagcatcaccttggattaacagccaatgttcagggggatgtacgtgactgaagtcccagcgcccagccggtggtgagattgaaatcaacacttgcggttccaattcttcagcaacaagtaacgatatgtaagctccaaagctgaaaccggctaaccacaatgcactgtcaggtcgctgtgcacgtacccaagccgctattgcacgcaagtctgcgcgttcaccatggccgttatcaaacatgccatctgaggcaccaacactacggaaattaaagcgcacagtcatcatgcctaattcacgcaatgcgcgtgcagtcatggtgacaactttgttatccatgctccctccctcggtagagagcggatggcaaataatcgcaacaggtgactgtgtagtgacattgaaccctggaaagtccactgcaacttcaagggaacccactggaccttctaaaaatagagtgccggacgtgttggggagtactggattgggcatacccatatgatagccgccctgcggcctgccttcatcattgatacagcccaggtcagggtaagtgcactgttacgacactgttacagcaaataagtgtttcatggactgcattatcagaacctggatgatctgtgttttagcggacctaacggacaaagcaatattcagcggcgccactgtgggaatgggtctggtagtgcgctccaatacattggccccatcctcagctcttcgttgctgagcaggcaagcatctaattcattacgtgcaacatctttatccatatccaacccaatgaccgccaattcttgtcggcgatcgccccattgtggatgccataggcgctgcatcgccacatattcgccaggatcgctcacctcatgcggcgcaggcaatggtgcggtccaacaatcattctgttgacgttgccaacctagttcggtgtagggcagtggggcgatgccaatctgcggcggcatattttcctcatgtacgtcgacacggtgccgtgcggcataccaaaacccggctgcttgagtgcgggtggcactaccaacgctggataattcgccaacccaatccatacgacttgctaaccagaagaagcccttgctgcgaatcacaccagacagcccatgagcaagcaaatggttgaagcgtaatgggtggaatggacggcgcgcacggtaaacaaagctggtgatcccgtactcttcggtttcaggagtatgttcgccacgtagctcgcgcatccaacccggcgcaagttgcgcgcgagtgaaatcgaaacgcccagtaccaacgagttggggtaggggtacttctccaaggtgtgcttcaatgatctgcgcgtcacggttaagcccgcgcaccactgcacgcacgcgcgcaagttgcgtcgtatcaatcagatcacatttgctgatgacaatggtgtcagcaaactcgatctgttggccaagcaggtcggcaaggctgcgagtatcgtcggaatctgcttgctgacctaagtcagctaatgtattcattgagctgaatagcgcagtaaattggctaccatcaacgaccgtgaccatggtatccaaacgcgctacatctgaaagacaaaagccgtcggcatcccgcaccgcaaatgttgccgcgacaggcattggctcgccaatgcctgtggattcgatcaacaggtaatcgtagcgttgctccaacgcaagacgtttgacctccttggataaatcatcgcgtagcgtgcagcagatacatccgttgctgaattcaaccaatgtttcatcggtacggctgagagcagcaccgccatcacgtaccaactgtgcatcaatgttgacttcgctcatgtcgttaacgatcactgccacacgcagaccatcacggttattcaagaggcgattcagcagggttgtcttaccggcaccaaggaaacccgagaaaacggtcacaggtaagcggagatcggagggtagcgtcagcgttgacatagcaaaccatcacctttgttatgcagttgtcgatttacaagcgtgatcttgtcgatatctgggatgcttggcgggcgagccaagcaatttgatactttatatcattcttctcagaaaatagaagaaatcatgtgatgaaggatatgctgagataactaagcagcggtgtagcatttgtttgggctgactcgattgagttttcagctctggatctgcgtcacttgtgcttgctggaagtgacccgaagactcgatttagcatggctgatggcccatctacaatccaccaaaccggctggctcacagtgcataaggagttctagcgaaacaccactgtccgatgaccgttaagcaagatccgatgttcgatatggcgactcactgcacgtgctaagaccagcgactcgatatcactgcctatgcgcaccaaatcatgtgccgtcattgaatgatcgacccgtgctacgtcctgttcgatgatgggaccttcgtccaaatcatgggtgacatagtgtgcagtggcaccgatgatctttaccccgcgtgcgtgcgcttgatggtaaggttgggcacccttgaaactgggcaagaaactgtgatgaatgttgatcgcacgcccaagcagtgcttcacacagcgccggtgaaaggatttgcatatagcgcgccaaaatcaccaagtcgatctgttcacgctcgaccatttgtaggatccgagcctcttgttcagtacggttgtctgcattcacgggtaagtgctggaatgggacgccgtatgaggccgttaaaggggcaaagtcgttgtggttggaaacgacagtgacgatttttgcttgcaattgtcgactatgtatacggaacaataaatcgttaaggcagtgaccttgcttactgaccattaccagcagacgcgagcctcggcgcgcatcgtgcaactgccactgcattgcataggcttcggcaagtatgttgatctggtcttgcagttgtgccaatgaactactatcagccacatcaaaatgcacgcgaagaaaaaacagatgactttccttatcaccaaattgttgcgcatcaagaatattacagcctgctcgaaacaactccccactgatccgatacacaaggccagtacagtcgggacaggataaagtgaggatatagtcgtgacgcatttttatggtgctaatggaaccctactggaatcggatggtcatcatttaatggtagcaatgtgtagttcatctaacctgcgcttactaaatcaaactgaaagtaacattgacgtaatgataatgatacgagccaggatagaatggagtaatgccttcctcactattcccttcctttcttaaacctttagccgcccacgctctggaactggcattaaatcgtctcttgacgcttgatccggatacctcgcaagcactacgtacacttgatggccaatgcatcgcactgtccctggagacgcctgctgtagcgttacagattcgtgttgatggggaatgtttgcgcgttggtccggtcgatgcagcgtatgagatggatctaaaagtacaggggacgttggccgggtttcttgggcaattaccgtggttggcgcaggtacgtcgggctggtggggcacagactgggcgtctgcgtgtggcgggtgacgctgaactggcacaacgtttgcaacagttagccagacgttttgatcctgattggcaacaaccatttattgttgtgtttggtgaattgcttggcgtacaggttgctggtgtgttgcgtatgactttgcggcagttgcaacgcagtgcagtggacttggcacagagtgcggccgagttcattactgaagaatccagcagcgtggtgccgcgtgctgagttggaagcgttctacgaggatgttgatgtgctacgtgatgatgtcgagtgcttggctgctcgactgatgaaattgtgttcggaaatggcagcatgaaagcgttattccgggcctgccgcattggcaaggtcatgctgcgctaccgcctggatacgttgctggacggtacagccgcagagcgctggttgcgtttggctaagccttttgtacctcgcatcagcgctgagattgttgagcagtccagagggcgtcggttgcgtttagcactgcaggaattggggcctatttttgtgaagtttgggcagattctgtctactcgcagggacctggtaccccaggatatcggtgatgagctggtcatgctacaagaccgagtagagcctttcgaggggcagactgcacgcattatcatcgaaactgcgctaggcaagtcggttgaaagtgcattcgcgcacttcgatactgtgccactggccagtgcttcaatctcgcaggtccatgcagctacgctgcatgacggacgtgaagttgtggtcaaagtgttgcgtcctgatattgagcatcagatcagtgacgacatcgccttgcttaaatcgctggctacgttggtcgagcatactcaccctaatgcggataaaatccgtccgtgcgagattgtggcggagatagaaaccaccttggcggctgagttggatttgcaacgtgaaggtgccaacgccagcgtgttgcgtcgcttctgggaggcgtccgacgacatatatgtacctgaagtaatttggtcgcacaccgccgaacaggtgctgactctggaacgtatgtatggcattccctcggacgatattgcgttgcttgatgcctcgggtatcgatcgtaaagctctttcgagtaagggaatccgcgtgttttatactcaggtgttccgcgataattttttccatgccgatgcgcactctggaaacatttgggttgacagtgatccggcacgcaaatccaatccacgttttattgccctggatttcggcatcatgggccagctctcgcagaaagatcagtactacttggcagagaatttcatggccatcttccataaagactaccggcgcatcgctgagttgcatgtggaagcaggctggatacctccacatgtccgcattgaggagttggaagcagcagcacgttcagtctgtgaaccatactttacgaggcctttatcccagatctcgcttgctgaagtactgatgaaattgttccatgttgcccgacgttaccagcttacgttacagcctcaattgattttgcttcaaaagacgctgctcaatattgagggtgtgggtcgtcaactcgatcctgaattggatatctgggtcgtagcgcgcccagtgctcgagcgcattctacgtgcccgttacagtccgcgtcatgcgttgaaggagttaaataaacgcttgcctgagatcatgactcatgccccagacacaccgcgtctcatacatacttggttagtacagcaggtcgaaagccggaaacagaatgacgtttatttgcaacaaatacgcgcgttagctatgactttgcaaggcttgcagcgccgtgtggtcaatgcgattgtgggtagcggcttgctggtggcggctgcggtattgtatggcctacatccggatggtttgtacttgggagcgattccagtgtggagcttgattagtgggtgcgttggcgcgttggccttgttcagtgcttggtggcgaagctaatgacgtcggactgcaggtagcacccagttggtcactgggaagaattccagtgtggaccgagatcagcttggctttacttcacagtgcttggtggtgagggtgagtgcaacaggaatcctgtgatcgaagcaaataaggcatttatcatacgatgtcatgttccacttctcttggaaccgtcatagatattcagtgggataccccccttgtctccgtaatcttggcaaagaaatcatatattccttggtcactcattttgcgtgcgtttgccaactctccagcctttgtggtgtagcgcactttgccatccgaattcaccacaactactgccggaatgccatcctggattgggtcgccataggcctgacttaactccaaattgcggtcaaaattgcccacgtcgatcttgaccacttcaaagtgctttgcaatcagcgccgtgttcttttggttacgcaatgatttatcgagtgctcgacagtcggtacaccagttggcaccgaaaactaagagggttggtttgtgtgtacgcttgccagcagctaacgcttttttgacctgagtccaggcatcggcatgctcgtcataaggaaggtttagcgcttgcgccggaaggattaacacaagtacgagcagtggtaaccatcgcttcatgaacggaactctagaaacagactatggatatcctgcatcttctaatcttgttggtgtgttggtcaacacagattgcaaggatcaatgagagcgagtgaacacgtgttaataaattaagagcaaaccaaaaaatccaaaggaacatgggtaaactagagacatgtacccatgttccacagccacatcagacctggtcgatcacaattcgatcacgtcgaatgtaacttccggattcacgtcagcatcataatcaacatctgcgcgttcgaagccgaatagtttcagaaaatcccgtttgtaattggcatagtcagtcaactggaacagattttcgttggttacttgcttccagatcactttgcaggttgcttgcacatcttcacgtagttcccaatcgtccaaacgcaggcgatgctcctcgtcgactgcagcgggctgaccgtcttcccgatacagacgttcgcgcagcaggcgatccgcctgttcgatcgtcccttcatgcaatcctttctctttcatcaccttgaacacaatcgcgatatatagcggtagtgcaggaattgctgcacttgcttgagtcaccactgattttagtactgctacgttggcgccaccgcctagggcttgcaaacgtgcatccaagcgtcgtgacgttgcatctaggtcagcttttgctttacccaaggcaccatgccaatagattggccaagtgatttcggttccgatgtaactgaaggctaccgtgcgtgtctgcggtgctagcacatccgcttgcgttaacgcattgatccataattcccagtcctggccgcccattactgcaactgtatcggcaatttcttgctcagttgctggctcaactgtggcctggatgatctggtccttgttagtgtcaatcgcattagagatgtgagcaacaccaatgggtttaagtaccgagcgctttatttcaccagtagacggcatcttgcgcagtggtgaagcaagcgagtacaccaccaaatcaacgtggcctcccatctcgctcttgatgatctcaatgaccttggcacgcatttcgtccgaaaatgcgtcaccgttgatcgaacggctgtaaagacctgcattcttagcggatttgtcgaatgccgcagcgttgtaccatccagcggttccaggttttttttcggtgccaggcttttcaaaaaacactcctagcgtatcggcaccaaagccgaatgcagcactaattcttgtggccaaaccgtaaccgctggaagcaccaatgaccagaaccttctttgggccgttactgcgcacgcctcgtgcgcgagtggattgaatctgctccagaacgttgtactcacaaccgactggatgagtggtggtgcagatgaaaccgcgggtttttggatgaatgatcaacggaaggatctcctgggaatgctgtaattgcagcatgttatatgttgtggaacgtgccacccagtccatctgtgacggtatgtaaagttcggcgacggggcactaagtgtggtcttttagttggatatgcggctctatccacagtttctaatacccatgtcaatgcgtctattgacacaaacgtcttgaaaccctctttacacatgatcctgaccctatatcagtaggggagtgcggatatgtcttggcctgtcatccagaacctgggtaaataaaatgcagggcttgttatttatagcgtatgggttatggctctaattcaagtcaataaaaccagcgctcctagatcacgcattgcgtgatctaggattggtcgtcatcgttgcatctacagtcgctctgtcggcttacccctgatagatcaatttaatgtctcgctgaagacgtgatttgcggctgttgctgtcggcacgaatgccaatgtttcttcctgtgcggagcgtacagtccagccaatgccattcttattgggttggaaatggacgagttcgccaaccttgaatcctgcggtgggattgtcctggcgtgctggccaacgtaactctgcttggttctctggggccttaggatcctgcaatttcacttgatatccaccatcttgctgaatttcaaccgacttaacctgcattggcggcggtgacttcagcttgttgttggcctgatagtgtttctgagaactgctatgttcctgactcagtttggttgcggtcatcgatgcgccatcaatgaatcccccaacagagatgagaggcatgctgacaaccagcattgcgctggcccctgcggcccgtccactggctgagattgcagcgccactggctgatatagcgtcactggcatgcacagagggactcgaaaaaatcattccgaatgatcccaatgacaagaaagcgcctaacaggcgtgaataattcatggtgaagctccattgtttgaagaggaaggaggaggttgatgcgcgatggattgatctccgatcagtaggccgcgttctaataaaaagtcaaatatggattcaacggtgactacggaataattgccagaaatacgctctccccaaggatgatcggtggtcgttgcgttggtaacggtgaaacgcgcaccaaaccgttgtcccaggcttagatgcaagctgctaggtttgtaatgtaccttgcgtagccatgcttggactttgttgcggttgtctggcattgggccatcagcagcggcaagtgctgcggcgatgatctccagtacccattggttggagttctggtagccagtagtaaaaggataggccaccgcactgtagcgcggctcgtgcaagcgttgcatcagtccgttttgagtggtcagcagtggatacaaacgctgctgtagcgatggcgccagcacacccagacgcagatccccggtttgtgcggtttcgccgataaagttagccaacccctcacggtacaattccgaataacgactcttgcaatgattcagcaagtggcggacacgccattgtccatccggttcgcggacgaccaaggccacgtgactgtgacgcaagccatagcgacttagattctggccagagcgggcgatgattgccacctgtgtgcccggtaacgcatccagttgctgggcggtgcgatcagccatggtcaacatggcttcggttgcagcgggtgatgggtagtgtgattggcagactggtgttgctgctgtcgctactgtcactactaagcttaagagcagcaggaaaaggcggacgcgcgcaaacttatttttcattttgagatcacttcgtccttggattgaaagctcgaacctataccattccaaaccatgcacgcacttcattggcgatgcgttcggtctctcgtagaggctgcgccagtgtatcgatagcgagtaaattttcaactgtgcataaacgtgcacctagggcatcaatgaaacaccgtatgcggccacgggtttgattggcgaatgcggcagtgactggagcacgggtggcacaggcttccgatagaaggttgaccgagtcggccgtggcgatgattgcatctgcccagccgaggatccctggataggggttggcgcctttgtcagtgttgttccaaaacagacctggtattgtggctaagtgtttgcgtaattgcgttgccaactctggtggggtgcgtcgtgaagtggtggccaacacactgccaccgcaggacaatcccttcaccagggcagtacataactcctccaattgagctggctgccaaggtgcttgcggtgttggtgctccgaccaacagcgccacccgctgaccaggtaagtcccccagttccggaaactgagcacgccccgttgctaaccaaacgtcgttcaccgggtgcagactaccaagtagagtgagcacattatggccgcgtatatgatcgtgctcgggcaccacgagcaggtcccagtgacgtgctggtaagcgcgggtccaaaatttgaacgacgcacgccccctgcttgtgcagcagacgtgtggctagtgccgcttggcgtccgcaaccgattgccagaaatggtgggtatctcaatgcgtgcgaaaatgtggttccaaaggcgtgcttggcaccggggagacaatagggcgccgtccagcgccacgggatacgtggcttgagtacttgtgttgtataaaggctgccgaccagagtgctggctagtgcttctgcttggcgtgtattgccggtgcggccgtcgctgatagccaagagattcccagatcgtgtcacacccgacattggtttgttagaaaaataggcatgaaatatgcgttactttaatactccccacttttaaagttctaaccaccaatatgtgattgtttgcgttactggtaagcgattactatgttttgatgggcatcggtgatgccgtgttgcagcaatagttgtctactgcgcggatgccaaaagctggtttgatggggtgccgcactctacaggggagttgtctgatgtagccatgcgtgctttggcaccggatgttgctccgacctcagaattcgacaacgccaaagtggatgaaaggttcttcgttgggctgctgcaacgttcatttttttgattcatctgggttatgacgattccagatgtgtgtccccgtacttgccacgcttgagtttcgagcaaaccgtacacatcttctgactgtttttatctacttgtgccttcaggcactacctcaattatataaggttttgattttatgaacacctctcaaaaactgttgttgcctgttgccttaacgctgtacatgactgcttgctctaatcccgccaagcagccggaggttgcctctacttcggcagcaagtgaagcgactccttcccctgcggtgacaccgcctccaagtgcggctgaacaggtcaagcctgttgaggcccattccgggacttatacactggatagtaatcacacgaatgtgttgttacagtggaatcactttggattctcgaatccaagcgcgcactttggtaatgtcgaaggcaccgttgtttacgatgctgccgatgtcactaaatcgacggtgcaagtcaccctgccgctttccggtctaaacagctttaccgctaagctggacgagcacttgaagagtaccgatttttttgatgcggccaagttcccaagcatcaccttcaagagcaccaaggtcgtatccaacagcaccaacaaactggctgtgactggtgacctgacggtaaaaggcatgacgaagccagtgactttggatgtcaccatcaatggtgctggtgaacatccgatgacaaaaaagcaagcgatcggcttcgatgctaacgccacgatcaagcgtagcgaatttggtatgagtgcttatgttcctaatgtcagcgacgaaatcaaagtacgtatcacggcagaggcgcaactagaaggtgctgttgctaagccccatcaataaaagaaggtattgtacagagacgatactgtagacatacacaggcctgcaatgtgtggggcctgtgtatgctctgaagctcacctcatcggtgtcttccggtctgaaaaacccgctcagacaccaatcatggctatgagcgacagtccagcatcacgtcaaccaagtcagtaggaccagacccaatgcgatcctgtagtaagcgaatggtgcaaacgaatggttcttgatatagccaagcaaccatttcactacagcgaaaccagtcaacatcgctgctacaaaggccacgctgacttctagccagttctcgtggagtagctcgccacgtttgaataattcaaaacatgcgtagctgcttgctgaaaacatagtcggaataccaactaaaaaagaaaactcggctgctgctgaacgtttgctgagaccgagtaacatcgctagaaaaatggtcgaggctgagcgggatgtcccagggaacacaccagccactacttgcgccaaaccaactgcgatggcaacgctccaggtcacgttttcgcgttcaggcaaatgtttcgccacagattcagcgatcagaatccatatccctccaataatcaacgcccatgcgatcggctgtatcgtttccggtaactgccagttggccttgcgcactgccaagccaaccactgcagtaatcaggaaagcagtggcaagcttcatcacataatcacggttgctgtacttgtccaggccggtggcaagtgaccacactctttttcggaatacgaaggtgatagccagaatagcgccggcttgaatcacgatgttgaagaaatctgaccgggagccgagccagtgttcggcaataagaaggtggccagtgctggaaacgggtagaaattcggtgatgccttcaagaatacccagcattagggcagtaaatagttcgaacatggggggatggttgagagccaaaggagggacagcataatcgatacatgaatgatctgtattggtgcgattcaggttggagagttgcaccatataagtgctttctaatgtagatcattaatgcttacccgaaaaaaatcaatggattgcaaggttggcagacttggtatgccaattgctttagctgtttctgactgttaccccaatcctaaaaggtttcctctgatgtcgctggaaaatgttgaaaagcttgtcaaggataaaaagatcgaattcgtcgatttgcgctttgttgatatgcgcggcgtgcaacagcacgtcacctttccggtgaacattcttgaaccatcgctgttcaaggatggaaagatgttcgacggtagctcgattgccggttggaaggggatcaatgagtcggacatggtactgctgcctgacgctaacaccgcctatctggatcctttttacgctgatccaacgctggtcatgacatgcgacatcctcgatccagcgacgatgcagagttatgtgcgtgatccccgaggcatcgccaaacgtgccgaaatctacttaaattctttgggtattgctgaccaagcatttttcggtccggaacctgaattttttatcttcgattcagtccgttttgctaatgatatgggtcatgcttttttccaaattgcttccgaagaggctgcctggaacacaggcgctgagtttgagggaggtaacggtggttaccgcccggcggtaaagggtggatacttcccagttccaccgactgactcgctgcacgatttgcgtgccgagatggtgaagaccctggagcaggttggtattgagaccgaggtgcatcatcacgaagtcgccactgctggacaatgtgagatcggcactaagttcaactcattggtcaaaaaggctgatcagctgatgacgatgaaatacatccttaaaaacgttgcttaccgcaatggaaagactgtcacctttatgcctaagccgatggttggtgataacggttctggcatgcatgtgcatcagtcgctctctaaaggaggggtcaacttgttctccggtgacgaccatgctggtttgtcgcagcttgcactgtattacatcggcggtattttcaagcatgctcatgcgatcaacgcgttttccaattcgggcacaaatagctataagcgtttggttccgggcttcgaagcacccgtgatgttggcttattcggcacgtaaccgctcggcctcgtgccgtattccatgggtttctagcccgaaggcacgccgcattgaaatgcgtttccccgatccattgcagtctggttacctcacctttactgcgctgatgatggctgggctggatggcattaaaaacaagatccatccaggcccacccaatgacaaagatctgtatcacctgccgcctgaagaggaaaaattgatcccgcaggtttgttcaagtttggatcaggctcttgaagcattggacaaagaccgcgatttcttgaaggcagggggtgtgatgagtgacgattttattgacggctatattgcgctgaagatgcaggaagtgacgcagttccgcgcggccacacatccgctggaataccagatgtactacgccaactaagtatgtagtgacagtgatggtggaatttttaccttccaccatcactatttcttccattttcttaggggtaggggaggattgggagtcaagcggccttctggagcactcttcctccagctccgttctggaattgaactgagaaagatgccgtagcgtaagttagaatctgcttgcccttagagggcgctgctctggtttctgattaatccgatattactgtctgctagatgcgttccacgattggggtatgcgaatgaaactgattactgccatcattcggccgttcaagcttgatgaggtgcgagaagcactatcacaagttggcgtgtcaggtattaccgtgacagaggtcaagggctttggacagcaaaagggtcatactgaattatatcgagggactgagtacgtcattgattttttgccgaaaatcaagatcgaaacggtggttactgatgagcgcttggattcagtcattgaagcgatccggatcgccgctgttaccggaaaaatcggtgacggtaaaatttttgtcactaaaatcgaacaggttgtaagaatccgtactggcgagatcgacattgatgcactctaactcttgccatcttagtgatatgaagaatggttttttcgcaatgttgaagagcctgttttatacgctctgtatattgatcgccttggctttgttggcaggtggcaatgcgatcggtcgtgcggaggctcaggtacaaaccaatcctttgcctagcgagcaagtcaccaccgaattgttgatgtctgaagcagccccttccgacgcggctgcaatacctaaaacgactccaacccccgtggtagacaagggggatgttgcttggatgctcacctcaacgctattagtgctactgatggtgttaccaggcttggcattgttttacggcggtatgttgcgctctaaaaacgtactatcgatcatggtacaaattggtgtggtgttttctctgatagccatcttgtgggtgctctacggctatagccttgcttttgctgatggtgacatgtttatcggtacattcaataaggcatttctttatggcgtagacactgcaacgttggccgataccttctctaaagggttcaaactgccggagtacctgtacgttgctttccagttgacttttgctggtatcaccggggtattgattgtcggtgcttttgcagaacgcgtgaaatttgctgcggtactgctgtttattttcatctggttttccttcggctacctgccactggcacacatggtgtggtcgacgccaggttttctgttgagcaagggggccttggattttgccggtggtactgttgtacatatcaatgctggtattgctggattggtcggtgcttactttgttggtaagcgttttggttttggccaggttgccgttaagccgcataacgtccccatgactttcactggtgctgcactgctatgggtcggttggttcggcttcaatgctggttcggcgttagaagccaatagcattgctgccttggctttcatcaacaccatgcttgcgactgctgctgcgatcctcgtttggtcgttgctcgaaaagatgaccaagggaaaattctcagccctgggtgttgcttcaggcatgattgctggtttagtaggcatcactccagcggcgggtacggttggtccgtttggtgcaattgcgattggtgctgttgccgccgtgtgctgtatctggggcatcactggactgaaaagattattgaaggtggacgataccttggacgtattcggcgtgcatggcattggtggcattgttggtgcgattttgactggggtttttaccgataaggcgctaggcggtcagggatatgctgaggggatgacaatgagcaatcaagtcatgattcaagccatgggtgtggggatcagcattgtgtggattggaatcgtttcgctggtaggtttcttaattgtcaaactgctgtttggcttgcgtgtgagcgaagaagctgaacgtgaaggattggacattacatcgcacggtgagtcggcgtacgagtcctgagtcttgttcaggtcacactaaaaccttattgccgtggtactgttaccgtgccacgaagtccatgtgatggtcatacccataaggttacttatcgaatctaccgttgcaatggtggcagtgatcagataattgtgattccggcaggtacccacaatgagcttatgtgtctcatagagcgattggcacacctcaagcacatctgccgcgctatacccgaatttgttagacgccaagagagtcatgtcagaaagtgaataagcacgcggctgtgccttcttctttggctcctgcttgtactcgatgaccttacctatatggccagtgatggattcgaccaacgtgttcgcgatgaccgtgtcgaccaaacgaccctctgggtctagcccaacttgatcttctttcgcccgccaaacggcaacgaatacaccaccctcgtgtttaaatgctgcacggatcgtgtggtaaggaatcgatttgaatgcctcaatctcacggtcacgcatgaccaccagcgccagcgttggagtctgtacacaccctatcgtctcagcaatgcacgcgaacccccgcgctgtgtgcgcagcgtataagccctgctgaaattgataccaatcagccagtcggcccgactacgtgcccgtgctgcattggcaaagccttgatactcggtgttacttctgagcgcagcaaagccgagagcacgggccacagcaacctgaaatacggcagcagcccagggcggatgttttctatacccacatctacgatacccgcgtcagaacggcttggccgtggtcttgcacgagttggggcgcattgagcgcacgctgttcattctgaactggttgcaaaacgtggagctgcgccggagcacatcaatctgactggcgatgacctgtggcgcaacagcgccaagatcggcgctggcaagttcagagcactacgaccactgcaaccggtttagtgtgctttattttccgttttcttaagcaactccatcttaaacacaacagcattctgatggcttaccccctacgacgttgacttgagccaagcttgcgggtcaacgtgttacgacccagaccaagacgtgcagctgcttcggcacgacggccctgcgtcaaacgcaatgccacatccagtagcgttcggtccaaacatttgcgagcctcggcatgcacagcagttgcgcctgccgctaagcggccttccgcccatttggccaaatggatatcccaatcgctttcagtgttacaacgcttgcgcttgccatgcgttaacacagcttcaacatcattggcatcaattgtctcagtgttcaccaaagcagctaatcgccaacaaatattttccagctcacggacattacctggccaatcgtagcgacgcagtatctctagcgcatcggcagacaaacgtttaactgagatatccagcttgtgtccagccatcgccaaaaaattctcggccaactgtgccacgtcatcacgccgctcacgtaatgatggcagttgcaagcgcaccacatccaaacggtgcaagagatcggaacgaaaacgaccctgctcgaccaacatatcaagatcctgatgggtcgcagtaatcacacggacattgacacggatcagttcgcggcccccgacccggaagaattcattttcagccagtacacgtaacagtctcgtctgcaaagacaatggcatatcgccgatttcatccaaaaataaagtgccgccatcggcttgctcaaagcggccaatatgacgtttggtcgctcctgtaaacgcgccggcctcgtgaccgaacaactcgctctccaaaagctcggttggaatcgccgcagcattcagcgcaacgaacggcgcctgcgcacgcggagattcgttgtgtaacgcacgtgcaacgagctccttgccggtgcctgtttcaccgttaatcagtaccgagagtggtgcctgcgccaaccgtccgattgcacggaacaaagcgcgcatcaccggagtgctgccgatcaagacgggattactgttggcagcaggcaatatgggtggtcccccatgagatccttctgtatgtggtaacacacgagctgccaacgcaaccgcatcgtctagatcaaagggcttggacaagaattcatgtgcaccactgcgaaatgcaccggcagtgctagccacatcggtgtaggcagacataacaattactggaaggtgcggatggcgtgctttgagcttgtccagcaaaatcaaaccatcatcaccaggcatgcgtacgtcggtgaacaataagtctgggattggggaggctgccagggcttgcaacgctgcgcaagtactctcaaaaccttccacgatatagcctgcatcacgcagtgcagtagacaacacgaagcgtaccgagcgatcgtcgtcaaccacccagatgcgtggggaagtcgcatcaatctcaaccatagtgcagatccttgtcagactcgatcatcatttgaggtagcgacaggatgaatatggtctgtcctggctgtgagcggaaagtcagcattccatgatgctcgtgcgctacctgctgagccaggggcaagccaagaccgctcccctctgcacgactgctgaccaatggtagaaatacgtgttcggtcaatgcttcgggaacaccatcgccatcatcaatgacctccaaacgtagcgacatcacgttgacacgatcacggatgcgctgcccatgctcaacgcgagtacgcaggatgatacgactggcaccggcttggatcgcattgcgtactaagttccatactgcctgggtcaacctatcagcatctccaaggatgtccggaatactggggtcatagtcgcgctgtaggatcactgagcaaccggcttcagtttcagctaaaggcaggacgcgctcaagcacagtatgaatattaagctgcgcatgcggacgcgccggtgccgaaaacaacaggcgctccaacagggtgttcagccgttcgatctcggcaccaatcagctcaaccaaatcgcattcctcctggtcgcggtgtttgacacggcgtgctaacagttgtgcagcacctttgaggccagagagcggattgcgcaactcatgcgcaagccctttgaacgcagcgctaagcgcattaggtaacgcttgaagcgtatccaatgcggaacactctttgattggatgcgcttcgagtaaccaagcgcctgcttccaacctagttaaccaaccctcagcgaaagacggcgtcccaccgggtatcccgagtgcaaaacgatgcaaacacagtacattgtgttcatcattgtttaggaagcttgatagggcatttccctgctgctccagtgcttccagagtttgctgttgtagacgttttgcactgactccaagccaatatgcgaaagctgcattaacaccttggacacgtccttcagcattcccccatgcgactggggtacataaattttctaatgatggtggtggaaccggcatcctcattgcaccaatgtagggcccaatacatctgaacagtatgcatgtatgaatcccaacatgccgataccccacacgtactcgaagccatcaggcacgtttgtccagaggttgctgtgcttgggttatcccacttgctcgaaaatgtatcccgacgccaagggaagacctaactacaccatccaacgtaaggagacatgagtatgaacattccaaagatttataacgaaaaaactgattctggtgacgagacgaacgtaacggacactttccgtgaaaagttgattgataccgaaccacagtcaatgcgtatgagctgctaggcaaacggcaaggagaatccgtcaaagatgccttggagcgttcaaatcctcaatgacaatcatggcgtggggtttttgctgatagtcgttgtaaccttgtgaaggtagtccttacggacggatatttgcgatttctgtctagatttaaaactgttcaccggaaggtagatggtgccatctgactgtgtggccagttgagtgacatcagcatcaatctctacattaagtttggaggggtgaaccggttcagtgatttcatcggctgtttggatgctgacataccacttgccgcatgactggttgacggtaacgttcttcaccgtgcccaagacattacggctgttgcgatagcgtatcttcttgaaacgtgggaaatcggcccgtttggtgaagaggttggcgtaggcacgtccccaatccttgagtgactgttgcaggggatgaactggagcatcagtgcgccatgcagtgagccgcttgcacaacccagcatagccaagcttcttctcacccctcgacctaccgtcttgttgaacatgaaacggcacaagcccagcaacgcatgtgccgctcctgatggctatttggcttgagttcgtatttgaaggttttcggatggctataaaatatttagattgataaaaatcagaaatttgacataattataatgtgatttgcatcacataaaaatgtgcgaacaaaaagtgtttttgtgatgtcgattaaaggacgaaattgaggaataaattatgcaaacgattaaaaataaatttgttgttagaacgatcttggcaacaaccgtaactattgtcttaagtgcctgtggtggtggattagttcgtatagatataccgagaccgacacccacacccacaccgacacccacaccgacacccacacccacaccgacacccacacccacacccacaccgacacccacacccacaccgacacccacaccgacacccacacccacacccacacccacacccacacccacacccacacccacaccgacattgccctcactgccaccatcattagccgcgaagatcgggcggcatcttgaattgactaatacagaagccgcgcatgcgcttggtttgacgggcagtggctttattattggtatggttgacaccggcgtgcatcgtaacaatattgcgttacaggggaaggtgattcgcagcggtgtctataatttctatacggattatcacgccccgtcggctccagacgatgttgacaatcatggcaccttggtggctcagctgattgcgggtcagccagttgaacactggcctggtggcatcgcacccggggcatccattttctcagcgcgtgtttacccctctgaagaagaatttgaggcatacatcgaagaacaaatgacatcctcacacatcgtggatacttttgaagcagaagcatcgaagataagacttattaatgctgacatgatcgctgcgggagtccgcatccaaaacaactcatggggccattcgagctatgcaatgtggacagatccaaagatcacgaatttattcggggacacataccgtgactttgtgatcggcagcaatggtttggtcgtattcagcactggtaacgaaaagctatcacaaccaaatggacttgcgagactgccgagcttgctcagagcggagggctccccatcggctgccgatgatttggaaagagggtggttagccgtcgctggactggacagttttgatcaccccgaccagttgggttcttactccaatcactgtggtgttgcaatgcactattgcttggcagccccaggtaatgtcctagtcattgattccaacgtgactactacccctattggcaatgatggatacgaagaacaacgcggcacgtccttttcagcgcctttggtatctggtgcagcggcgttagtgtgggaggtatttccatactttaataacgatctagtgcgtcagacattgcttgggacggccaccgatcttggtgctcctggcgtggacgaagtattcgggtatggcgctctgaatgtgggcaaagcggtgcgtgggcctgccaagtttgattggggcgatgtcaaggtcaacttcaatgacagccgttcgacctggttcaatgatattagcggcggcggtggtttgatcaaagacggtacaggaaccttggtgcttgctggcagcgccaaccaatatagcggagcgacccaagtgcttggaggcacactccaggtaagcagcctaggtgagtcggcggtgagcattgcccacagtgcgacgttgattggcagtggtcgctttggtggtgcagtgagcaatgcaggcaccctagagattggtacagatggcctgaaggtccaaggcgattacacccagtctgagacagggcgtcttgcgttgaacgtgggtgatcaactgagcgttgcaggccatgccgccctccaagggggtgaacttcaggtgctgggcaagcgcgattatgtgagcttgaatacctcctacagcgtgttacatgcggatggtggtttgagtgggacgttctcggggttgacctggggtccggcagtattgctgggagaaggtcagcttcactacggtgccaacgatgctaacgtgaccctgcagcgcctggacgtcaatgcggcggctcgtgcattggggattgttgatactgttgcgcaggcttctgcccggcgagttgagcaagcgttccgtgaaattgacattcagcaggcccaaggccggggtcagttatcgacttcctttatggcggcggcggcggccttgcaacagtctgggagcgcacaaatggcatcggcttcgctgcatagtttgtccggtcaagggcatgttgcggcaacggcgtccagctttgatgttgttgatgcgggacgacgcagccttgccacccgtctgggtgagcgcccactgggtgaacgtacggtgacgtggcgtcagtcattgggtggttctggtcaggatgggactgctggaggtacatttgcactgtctggctggttgcttgggcgcgatactcaactggcttctggcgacattgtgggttttgcttttggtcaatctgaggccagtccatcgggcagtgtgtcagggctacgtggtcttgacagacaagtgcaagggcgtatgtatgtacagcgtagccaaggccccttgtatgtattgggtcagcttggttttggcagttttcaacgccgtctggaccggcagttgcaattgggtcattggagtgactgggcaagcagtcgctaccgtggtcaatttttcagtgggagtgtagagactgggtatcattggcgccgtggtgcatgggccttgacgccgtatgtgggcgtagatcaaacgcaactgaagacggatggattccgtgagcagggaggggcgggctttggcttacaggtacaggcggcccaagcgattcggagccagttactggctggtattcgtactgaattaggatggcgtggagtgaagctacgtggctatggtgagtggcagcagaccttgcgtcagagtgggttgaatccacaggccagctttacggcgacatcgtcatggacgcccttggtggcatccccctggtctagtcgttcaggcggacttcttggcttatcaatggtctggcccgtggggatgacggtaggacagtggaacatgggtgtagaacacttctttggtgcccgtaaacgcagtgatagcttgggtttgcgttatcagctgagtttctagtctaagtatggaagccgatgcacgggagtaccgtgcatcggcggtgtttagtaatgcgtgacagagctttacattgcgtgcttcgcgtgcgtgtcgcccataatggccgtttgaaatccagcgcatcatcagttgcttcagttacgtcttggagaaattttgtgcgtgtttcacggctcggctgatggtactgcggctacagcccaccgtcttttgcaccacactccacgtaatgccgctggcaagcagtcggttgatcgcactctaatcgcactgaagtaatagcgagaatccataaatccttttggttttctttaatgtcttggcgcctgtcattttttttcccgtcgagggcatcacgctattcagcgggtttaacaatccaagcagcgaactagcgataagtagcgagcaaggcttagcgtgctttgttttctgttttctgttttctgaggcgccccccatcggcgcgaaattttttaattctttacctttatttaacacatgaatcacattttatgtattaaaaatacacttgccatctatagttccaatgagagttataggttcattagatcaccatagagggcgaactcaagtaaataacccttaacacatatggagttgtgacaatgcgtgaactcaacgttgtagagctttcgttagtggctggtgctggtgctcgtgagcctagctggtggaatgatgttaaagatcttttagggtcatttgtacaccccactttcggtcctgtggaaggagggggtggttataatcccaatgtcgccatcgcgacagcatgtattaaccacggtggatcattccaaggaagttcgtttaatacctcagtatccgctggtgttggtgggcgtccgggagcttcggctagcgtaaacatcggctattccagcgcatcgtgcataatgccgcagccgcgccactgagagcacagggtaacgtcagctttgtttttgacctgagtggcaagccactcaggtcatttcagatgggtattctgagacagataaaattgcgatggctgagtggacatcgttatctctgctttgaaatttcatttctcaaaatcgtagtcatccatggatgaagcagaatatgcgaataaaaaccggaataaaaaaagcactgatcctgatgctttctgtagtgctggtgtcacttgttgcaatcgccgcaatcgccgcgcatcggttttatatacgccttccacaatccagactgttttatgcatggaagaaaatggatgaagtgtattacgacagaacgtttgctggctttgactggcccgccgtcttagccacctataaaaagcagctgccgcggttcgactcggatgggcagaaaacctcccccatcattaatgacatgttgtcgctccttgaagtctctcatttgcagcacttcccagcatttatggtttcagaagaaaaaaagaagacagccgtattagcaaattatttcccagaactgcgcgatatatcagggatggtgatggtcatggatatgttacccaggatttctagagtactgtctctagaaacctggtccccactgtatacgcatggtgtccgtgtgggcgaccgtattcttctagagacacttgatactgatatttctgataagaataaacctgtgcggctgtattgctatcacatcaatacagcaggggtaaaaaaagaattcgagttcgacctcccggcaccacctcttggtacgcaacagactgcggtgcctgcgggggatcatgtgctgcacatcacacgctttgatcagggcgaaatacaagcgcttaaacacgtgagtgaagatcgcaattcatccatcacccagctgcattatatttctttaggggctgtgaccacggcgcttcacctccctaaaaataaagtcattgatgtggttaaagattcagaagccgataaagcaggtgttgaaattggatccatcataggaaatggaaccaatattaaagcaggccctgaaaatatcggcgggaaaaaagtaataaaaaccaattcgaggtatgaagttgttctccctgatgggagaaaagttactttctctattaataaaataattcctaaattgaatgactttgagggaatccgttccgcacagctcatcggccaaacactggttatcgcattcaatgagatgagcgatgaaaatacccaatgggcattgcaacagatcaaaaatacccctgcaacagcgatcgtgctcgatttgcgctccaacacaggaggttcaggcatcgcaggagagaagttattggctggatttttaccttctggaacccgtatcgcaaccgaaatacgaggtaaaaaaaccaatgtaataaatgtcccttccggatatacaccgactgataaacccatggcagtgttaatcagtctgttgtcttccagtggcgcggaactagcggcaagaaccctgcaatttcaccaccgtgcgcgtatttacggcgcccaatcctcgggacagctactcgcgtcccgtttttataaactaacggatgggacgtatatgcaaattgcggataccaatttactggacccagcagggaagccgcttgagtggtatggcgtgatgccggatgtgaaaaaatggaaagccttaagcgatgtgcgtgcaggccgtgatccagtgttggaatgcgccttaacggacctgtccggcggacaatgtcactaatcctgcgcatataagtacctccacacctagctgtgatctcactcaatacagcgattttatttatacgttatcaaaatagtattatttttagcggcattgtaatctaaaaataaatttatttttgatgattggaagaaaatttaagcgataagcggggtagggatgtaagcggtttcagtggggggatcgcaatgtttatcctatggctgatgtattcagggggattacaatggcaacgttttttagtcagccataagggccagccggtgtcattgatcaaacaagaagactttatccagtccatcgctgatgcgctgcaatacatcagttactaccatccggtcgattacatcaagactctggttttggcgtatgagcgcgaggaatcgcccgccgctaaagatgcaatggcgcagattttgattaactcacgtatgtgtgcggaggggcgccgcccgatttgccaagatacagggattgtcacggtgttccttagcatcgggatggaggtacgttgggatgacgtcacgatggatgtggaagagatggtgaatgagggggttcgccgtgcctatcgtcatccggataacacgctacgtgcgtctgtgcttgctgatcctgccggcaagcgctgcaatacgagggacaatacgccagcagtcgttaacgtcaaggttgtttctgggggccatgttgaagtgattgttgctgccaagggagggggatcggaggccaagagcaaatttgcaatgctaaatccatcggattccatcgttgattgggtcctggacactgtgccaaccatgggggctggctggtgcccaccagggatgcttgggatcggtatcggtggtacggctgagaaagcgatgctgctcgctaaggaagcgttgatggaaccgattgacatccaggatttgatggtacgcggcccttccaatcgtgctgaagaattacgcttggagttgtacgagaaggtcaatgctttggggatcggtgctcagggggtgggtggggtgacgacggtattagacattaaagtcaaagattatccaacgcatgctgctaatttgccggtagcgatgatccctaattgtgcgtccacacgccatgcccatttcacattggacggtagcggtccagttgctctggaaccgccgtcattagagcattggcctaagttgagctatctcccggagtctgcccgccaggtgaatttgaatacgatgaccagggatgaggtggcgcagttcaaaccaggtgaggtgttgctactcagcggcaaattgttgacggggcgagatgctgcgcataagcgtatcgttgagatgctcaacaagggggagacattaccagttgatttcacgaatcgctttatctactacgtgggtccggtggatcctgtgcgtgatgaagtcgtcggtcctgcgggtccaaccacagcaacgcgtatggataagttcacgcgtcagatgctggagcaggccgggttgctcggtatggtgggcaaggccgagcgtggccctactgccatcgctgcaatccgtgacaacaaagccgtgtatctgatggcggtgggaggggcggcttatcttgtgtccaaggcgatcaaaacgagccggatactggcttttgaagatcttggcatggaggcaatttatgagtttgaagtcaaggagatgcctgtaacagtggcggttgattgcaacggtgagtcgatacatacaactgggccgcgtgagtggcggagccggatcggaaaaattccggttgttgtggagtaggaatggcgcaacgcctggaagcaatggaacagtgggccatgtcaggcggtgcgttctctactgtgttgctcgggttggtgcgtcatgtggacgacagggtcaggctggccacatgacgagttttatgaaggcaggtcagcaggggaggctgggaaccacaatggtctatgtgagatgccgtgtgcttttttgcctcacggtgtgggtttcttcgttattacatggatctcagagagttgctcttccgagatggaggagggtgcatcggtcatcaggcattgtgcgccggtggtctttggaaaaggaataacatcacggattgattcagtgccggcgatcagtgcggcgatgcggtcaatgccaaaggcaatccctccgtgtggtggggcaccataattcagtgcatcaaggaggaaaccaaatttggcgcgtgcttcatcctcagtaatgccgagcagttcaaagactgcacgttgcatttccggacggtgaatacggatagagccgccgccaatttcgttgccattgagtaccatgtcatagccgcgggacaaggctgtcctggcgtgtgcgcgtaattcgtcaatatcgtcaatggctgctggtgcagtgaaggggtgatgtaaggcaacgtaacgctgcgcttcttcgtcccactcaaacattggaaagtcggtgacccacaatgggcgccagtctgcggtgattagggcgaaatctttgccggctttcaggcgtaacgcgcccatgaagtcggagactttgttgtagtttccagcaccgaaaaacacgatgtcgcctttctccgctccgatgtgtgagagtagtgcagcaaaggcatcctcggaaaaaaatttagcgattggcgaagtgatttcgcctataggggcgagtttggcgtaagcaagtcctgtggcaccatacttggctgtgtaggcggcatattcatcaatctgcttgcgcgacaatactgccccgctggggatacgcaatgcggcaacacgaccgttgggatgtgcaacggcatcggtaaatggggtgaatgtgctgtcagcaacgagtgcggcaacatcaatcagttctagattgatgcgcagatccggtttgtcagagccaaaacggcgcattgcttccgtccatgtcatgcgggggaacgttgtatcaagctcgatcccggcgacctctttgaagactctccgaatcatctcttcaacaaagtcctggacgtcacgttcgcttacaaaagcaaactccatatcaagctgagtgaattcaagttggcgatccgcacgcaacgcttcgtcacggaaacagcgtgcgatttgatagtagcgatcgaaaccagccaccattagtatttgtttgaacagctgcggtgattgcggtaaggcgtaaaattcgcccgggtgcattctggcgggaacaagaaagtcacgggctccttcaggggttgctttcgtcaggattggcgtttcaatgtcttggaaaccgtgcatgtccagatggcgacgtagtgcctgtaccagtttgatacgcgtacgttgcatacgctgcatttccgggcggcgcaggtccaggtagcggtatttcagacggatatcctcccctgggttttcgtgagcatggaacggtaaaggtgcagccttattgagtatcttgatttttgtagcaatcacttcgaccttgccggtcttgatcttatcgttgaccgcatgacgggcgcacacgacgccttcaacttgtagtacatcctcataactcaagccactagcaaccttgaacagttctgagttgttctggtcgatggcacgcgaatccaccgtcacttgtacgatcccttcgtggtcacgtaaatcgataaagcagactccgcccaggttgcgggccacatcggtccagccagcaagggtaacggtgtggccgatcaatgtttcatcaatcaagccgcagaaatgggtacgcatcggaattccccaatgaacgatcgactcagaatgaagccggataggttcatattctgcggctcacgctccacctcggcaaatcctggctggtgtctgagatgcaaaacatgggtatctttgaaaataggataggcttaaatcaactaaagagaatgcccgccgcaatcttggggattcttgaatatcaaaaagatcacttactttatgcgttgcgcgtcacacaccatttatccttatatttatatacgtgttggcatccggtcatttgctatctggtgttgcttctgctgcggcccgccgtagcctaggtcataaatgctgccaaagggcttgttaatacaagcaacattggaaatgaagctgatacaactgcgctctttgaagttcgtcatcaagttgaaatagcttattgtcatagcgacgtttgcttctgattgctgttagatgtttctatccttcttgtttctatccccctgatttttcaaactttgactctaagtttctatatgaagaaagctgttgtcttgttatccggaggtatggactctgctgtggtcactgccatcgcccaatcgcagggatttatggtacacgctttaagcatacgttacggtcagcgccatacttccgagttggacgcagccgtacggatcgccagggtgctaaacgtggctgcacataaagttgtggacgtggatctacgcagcatcggtggttcggcactgactgacgacatcgaaataccagacgcaggtggcaaaggcattcccgtgacctatgtgccagcacgtaataccatcatgctgtcactcgcattaggttgggctgaagtcatcggtgcggccgatatattctgcggtgttaacgctgttgattattcaggttatcccgattgccgcccgcaattcatcacggccttcgaaacgctggctaatctggcaaccaaagtcggcgttgaggggactcagttacacgtacatgcgccattacagtttctaagtaaggcggagattgttcacgaaggtgtgctgcatggcgtggactttggattgaccgtgtcttgttatcgtgcagatgttgacgggcgcgcttgcgggcgctgcgacgcttgcaaactgcgtgcggccggattcgcggatgctggtgtcgcagacccgactcgctatatggagttaccctgctcgttactcttgctgtaaactacacagctgcattccaatgtgcggaagattgtggtcttgggccgttagctcagtcggtagagcatcggacttttaatccgctggtcgctggttcgattccagcacggcccaccagcttgtttcactccttctagtgcctctctgtttgccatacttgcgtgagatgcgttcggaaagctaacgccaacgcctactagtaccgttgccgctgttgcggttagccgctccagcattgattgccagattcggcgttctgtcgctgtgtctgcttcttcttcacgcacttttacgaacgtgctttcatctgcctgtgctatttcgattagcaatgcaaggtgttcatctttgattttccctccctgtctccatacgtgtagggattgcctggaaactcctatctttttcgctagtgctccgtcgcttccgcgattgcacatttctttagctttgtcaagaagtttatttatcgtattcaagtcagttctcgcttgacaatatgtcatatatgagtttacatgtatttatgtcagattgtaactgacttcccttctaatcttaccttgccgaggttagaggggttctggcaaggcaggttaggagaattgaatgggtattcagaatatgtcttgtgagcgctctgaggcgctcctagggccatccggtgaaaacgtttcgcatgtgtatacagagggccaacgctcgcaagcggagcggccgagctttggcccaagtagtaacacgggccaaaagggtgagtgggattgcttgggcatgcgtcaagacgatttcgactcctcgcggcttgcttgtgtggattttttaaccgttgtgatgagtcgtgatctattgcaacagtgtggttatttggatgaatctaagtttttattatctctcttgtttaatttagatcctaaatacatttctattggtaagcacacatcaaaccgctggcatttttattcttctagcgcatctatttttgatcataacggtgatgtggttggcaagttaggttgggatggtaataacgattctttttgtattagtttatctggtgctgcttgtcgttatattcgtgattggtctaaggttatttctgtcttgcaatcggtgggcgctcgtattacccgatgtgatgtggcctatgatgattatcagggtgaattggggaccgttcgtcatcatgaggcacaggctcgagagaatttagctccctctggaggttgtttgttatttgcctctggtggtactcctcctcgtacacgttttctagatgatcatggaggcggttcgggatgtactttgtacgtagggcaaaaaggtcataaacagctttgtatctatgataaggggaagcaattgggttcccctgattctccctgggttcgttatgaggttcgtttttatggaaaacacgccgttatacctttggatattcttgttgattcttttcgttatttgcgtggttcatatggttatttagattcattgttatctagggttgtttcttctgtatcttctcgtattcattgcgttgtaaagcatgtagaggcttccggtgtcgcgatggtgcgttggttgcgtcgccaagccggacccgctatcagtttgttacgtcaatctttgggtgagtcatttaatgattttatcgctcagtatattgagcgctccggctttccttcccgtttccgtcgcatgtgctcacgtgttcaattgcctacgtattttcgtgagtctttagcgatgcatcctggtttttcggaggtgtctaatgtcgcagcctaatgatgttgtggttgattttaatgagagtatatctctcccgcctgctgttgctgcggcttatcgccgtaagctttctgcattagatgatatgcctgcttttattgatcgtcttttctattcaaatagttttctcgatagtatttctgcttggcgttttgctaattgtattactgaagagcagtacgtttggatgtttagatcagttcgtgcagctttgcagcgtgatcttggtcttattagtgatatcgatttatctcggagtgctattgagatagaagagtatgcgatgaagagtaattcattatcattagttgattaatgagggatgtctatgtctgtttattatgtacctcaatctagtataggtgttattcctgataccgggtgtatgagtgttattgagtctgatgattatgcctttgaatgggagtttgattgtgcagttgatgatcttccattttatggtgaacatttagagtgtgattaggttattggctaatcttcacatcactttgctttgtatgatcggcctcatcatctttttttattcgagatgttgagtgccgacacagtttttaaatgataccaataattagtaacaatgctctttctattgctttcattctctcgtcattgagacgtccaaaaggttcgctgattttgttacgtggtagtgttgaaattttatctaccatgacctgcgacagtgtccgtaaaccattggccgcagttggttcaacggtgacacgaaatatcgcattccgcaggtcgctcgtgaccggacacagtgcgacactatctaactccgttagaaggtctgattgaacgatcaacgctggtctaggcttgccgtagtcgccttgtagggaaactgttacaaggtcgccacgttgaatcatttccaatcttcaatatgggtcatggctttttctgtgaagcgtaaagcgtcggcttctgcctggtcgcctttcagggcgcggcactggctttgaatttcagcagcgaattccggtgtgcgcgtatccggtacccagagctgcacaggacgcaatccagctgcgcgcatttgttccctgtggtgaactatcttgctgtctggtctgtgagttgatgtcattacaagtttcctttagttacctgcatggttacatgatgccatgcataaaattgacgtgggggggtgtagggggtgcgccccctacggtgactctaaattcgtgttgttgtagcgctgactagattagggtttcgatattttctccgcgtcaccagctcactatcttccgtaaaccgcttttaggacggcattgcaatgtctaggagtgattagtggcattttgctagcctagtcattttccccattattttcatgatgttattgagtttcttccatagcgtttttagtcctcggtagagcatcggacttttaatccgctggtcgctggttcgattccagcacggcccaccagcttatccgcttgttttaactcctctttatttcctatgctcgcgtgagatgtgttaggattgctaactcctacgcctactattagcgctgctgctgttgcggttagccgttctactattgattcccacattgcgcgttctttgggtgattctgctttttcacttctgatactcgctgcccattttcctccgtctagatttgccatgtcgcatagttctgcgatgcgctcatctgatagatgcatttcttcacgtcttatttttgatatcgcttgacgttgtatgcctagttttatcgctagtgcattgtctgactcgattgagcatatttcttttactttgtcaagtagaatattttcgctgttcatgtgtcttatttagttgacatgtcccgtaaataggttacaatatcttatgtgaactaatcaggtcacatcacctctccattcatcctatcctggatggggaggtgttctaagacaggataggacacggtaggagtgtagcaatgttgaataatcaagaatctttatctgcggcttctgcgggttttgtgactgatcaaggtgactcttgtagtaccccttctaaagttgatctttgggtcgctggtattgaaaaggtaatgggggaattagttttagtttcttctcgttatgctgatttaggtcttggtgatttagacattgaaatttttaaatatggagatagtgttaattcagctcttttaaaagcttattgtgatttgacgcttcttttagatcatgtagagcatatgcgtgaggcgggggtgtcagatgtcgatatttaataataatctgaaatttaagaaaaattcttttggtgaagaagttttattcgctcgtgctttaattttgtcagattgttcttttgatatttcttccctttctagttctctttgtgattttcgtcgtagtctggaatctcttgatgcgaagcttctaaagttagctgaattggatgtttattcagttgttccagatattaattcttctttggcatctcttttttcttctgtcgataggttgcgattacatgtggctgatgtgccgattcttgagccttcatgtgtaacattttattcacggtgatatatgcgtattactgacactgaacgaggcgcacgcatggcattaaatattgctgagatgtacgttcgtcaattggatttttgggaagacacactaccccagcagtttgatttctggtcgtcagtgcgtgctgcggcattagatcaattagacgagtgtgctttattgaggcaatcattattgtgaacgattcaatcatcctttccttggtaattattgcgggttttcttaattttatttctgtatgtctttgggggaagaatcgtaggtctcatgactgtattcccttgttttagctactgctcttcttgttcttaggttttattgatgcttaatttatggaattgcgagagactgagttttgaatctctctttttagttaggttagctatttctatcgttgttactattcttgctggggttttttcatgctttttcatgtttctaattgtttggttttgcttttctgcctttggctgggtattaattcccatatcattcgctacttttgtctattacgtcatgggaaagattcgtaatcaaatatagttgcttttagttattgaaaacattgtttggagaatatcaatgaatgacttgccttctttcatcgcgtatcggtgtacgtaatgtgtgcatcttgttggcagtgcgtgggcgacgtttctccgtccatccactgtcaacaagatgtgcatatggtgcgaagcaacgtgcacggataggcgatctagttatgttgaagtgggggaaatgtctcttgaagagagtgataagcaattatgtcaattattaactacccagttcaatcaatccggggtccgccttcaatcggaagcttatgctgatttattacggcgtactcattggcagcagttttggacattaacgttccgaccgacgaactccggttctaatggcagtatgcatccggaggccgctgataaagcgttccgattttttgtcagtagtattaatcgggagttatatggtcgtgtgtggtctaaacgtcctcatcgcggtattcaatgggcgagagggcaggagtggcaccgtgacgggcggttacattttcatgcggtggtagctgcgccggatgaggatattaactgtttaatgagtcggtatgagtggcacgagttttggtaccgagagtttggccgtaatcgtatcgaggctccgccttctgttagttctgagaggtggttatatcatcttgaagggggggtgaatatattggtcatctgagtaagacggatgaatcagttcctgattattcttctggtttacctccttctgtgatccttgatactgatttggggcagttggtgcgttctgatccttctacagtcaatgctgttttaactgattctcagacgggtgctgttcttcttactcctgagattgtttctgctttgaataaattgcgtcgttctttagaggatgagttgaaggcttctcatgctcctgatcagcagccatctagtggtggtgctagtccccctcgctctggtacggcttggccgtctttttgtagttgggccagtgttgtttgtgattttattgattgggttaagtctgatgaatttttgaagaaacctcttgttcctcctgatgttccttatgttgataaattacctcaggctaagacttggtcatctggtttaggggagggcgcttgtccttctcccacgactattcctatagagttttcaggttataagacgagtgttgaaatttcttatcagcctttctgtgattttgctggtttaatgcgtcctgttgtgattgtgattgctacgattcttgctgcttatattgccggtggttttcgtggggtgaagaatgtttagttggttagcaatgttgttgcgtaatatcttgggtcagacggttgcacgtggtttagtgggtgctggccttgcattagtgactactgttcctttaattcctcttgttacttctgcgttgaatcttattgtttctaagatctctggtattcctgcggatgtattaaatattgctttgttaatgggttttggtgaggcgttgtcaattattggtagtgccatgttgactcgcttagccttgcaatctctccatgttggaatagtgaaggcgactacttaatgttaaatcttgtgactggtgctccaggcaatggtaagactttatatgctgttgattggttaattagacagattgagattgataaatctcttgttaagtctggtgctgttcctcgttctttttacactgatattgaggggtttgatgttgaggcagttcgtcgtcttactggttatgttgtccagtctgcccctgaggattggcgtacaacgcctcaagggagtgtgattgtttacgatgaagctcaccgtatgtttcctgctggtcgccctggtcgctctgatgatcctagggtgtgtgatttagatacacatcgccatggtggttatgatcttatgtttgtcactcagtggccgacgaagattcatcatgagttacgtcgtttggtgggtgagcatgtgcatttgaaccgtgcgatggggttgcaaaccgctggtttatatcgttggtctcgtgctcaggatgatccctatgatattcatcaacgtgaaaaagccgaggaggaggtttggaagtttcctaaggatcgttatgttttatatgcgtctagtactcttcatactgtgagtcataagtttaggattcctaagaaggtctggagtgctctatctgtttgtgtcacttgttctgtgattggcttggttttttggcattattatagtcctgctcatttgtctgaagctgcctcttctgttgccggtgcctcggggcaagcgagcttgcgagctgccccggcttcgctgagttcttctcgttctttggtttctgggatgcgtatgtatgcggctttagagactgaatctgctccgacgttgtctgggtgtgtgtcttctgatcgttcttgtcgttgttttaatacggatggttatcagattgatatgagtgtggttgagtgtcgtggtttgttggcttctcctttgccatttaatgtttatcacgcttatgtgacttcttcttctgctgctgtttcttcttctccgtcgtcttctccttcttcttctgtttccttgtcttcttctgtttcttctgctcctattttggggtcttcttctgttccttcttctcattagttaggttttgggtgagtttttttagatttcttctaatttctcattcatgattttattcttttgtcaataaatcaatttccgcgccagttatgattggttcataatcaatttagtttatgttcataattgtatctgaaggggaggggagtcgttatttttattgatatagttctcagttagtggaatagcttgataaagagtgttgctgccgttgctcctgccgcaatgaggctactccccactactacgggataccatttggattctgttgtgagttttagggtttctttcattagtttttgtgtatgtgcatttacctcgtgaatttcagcttgaatcttggctgtttctgagagtaattttgcaatttgtattctttgctcatctatgatctctgttttgtcttctttgagtgtcattgtcatttttcctagtgctttctttgcatagtgtagagcaatagaagggggtgtagggggctagccccctacggagacgctttacgcttttgttggcgttgtgtcagtacgtgccttaatactataatcgacgcgctccccgtggttgggtactttcttttacgcaaacccgtttttttaggtgcgtcagtgatgcgctgcggatcggatgcggcaaggccgccttgtggtgctgtcgctcgtgcttcttccatcattttttgccattctctggcaagcgtgcacgttagtgataaccatctgagttgccattcttcaatgctttttctttcgggtgtgactagttttccgtttatgaattggaatcctgtccagttgcctgtgagtgtttggtagggctttcatgtcttttaagttgtttagtttttttttgtatccacttcagtagtacgttttgcttttttttccttctttccccatttcgcataatgcatattatgtccgctggagaagatgggtacgagaactagctagtagtctaaaaaagagactaacaaacactctaccagtgcacgcataatgagtaagaataagattccaaatcagatacttacaggcaactgggcaggattccaattcatcaacggaaagctagtcacacccgaaagaagaaccattgaagaatggcaactcagatggttatcactcacgtgcacgcttgccagggaatggcaaaaaatgatggaagaagcacgagcgacagcaccacaaggcggccttgccgcgtctgatccgcagcgcatcactgacgcacttcaaaaaacggtttcgcataaaagaagacacgcagccaatgaaaccgcgtcgatcatccaattaaggcaagtgctgatacaacgccaacaaaagcgtaaagcgtctccgtagggggctagccccctacacccccttctgctgctctacactatagaaagaaatcaccaagagaaatgacaatgacactcaaagaagacaaaacagagatcatagatgagcagaaaatacaaattgcaaaattaatctcagaaacagccaagattcaagctgaaattcacgaggtaactacacacacacaagaaatgaacgcacacattaatgaaatgaatgcacgcacccaagaaatgaacgcacgcacccaaaaactaatagaagaaacacaaaaagtatccaaagaatcacaatggtatccagtggtggtagctagcggcctgcttgccgcaggagcgacagcagcaacactctttatcaagctattccactaactgagaactatatcaagaaaaataaggactaccctccccttcagatacaattatgaacataaactaaatggattatgaaccaatcataactggcatggaacttgcgttattgacaaaagaataaaagcatgaatgagaaattagaagaaatctaaaaaaactcacccaaaacctagctaatgagaagaaggaacagaagaagaccccaaaataggagcagaagaaacagaagaagacaaggaaacagaagaagaagacggagaagacgacggagaagaagaaacagcagcagcagaagaagaagaagtcacataagcgtgataaacattaaatggcaaaggagaagccaacaaacgacgacactcaaccacactcatatcaatctgataaccatccgtattaaaacaacgacaagaacgatcagaagacacacacccagacaacgtcggagcagattcagtctctaaaaccgcatacgtacgcatcccagaaaccaaagaacgagaagaactcagcgaagcgggggcggctcgcaagctcgcctgccccgaggcaccggcaacagaagaggcagcttcagacaaatgagcaggactataataatgccaaaaaaccaaaccaatcacagaacaagtgacacaaacagatagagcactccagaccttcttaggaatcctaaacttatgactcacagtatgaagagtgctcgaggcatataaagcataacgatccttaggaaacttccaaacctcctcctcagctttttcacgttgatgaatatcatagggatcatcctgagcacgagaccaacgatataaaccagcggtttgcaaccccatcgcacggttcaaatgcacatgctcacccaccaaacgacgtaactcatgatgaatcttcgtcggccactgagtgacaaacataagatcataaccaccatgtcgatgtgtatctaaatcacacaccctaggatcatcagagcgaccagggcgaccagcaggaaacatacggtgagcttcatcgtaaacaatcacactcccttgaggcgttgtccgccaatcctcaggggcagactggacaacataaccagtcagacgacgaactgcctcaacatcaaacccctcaatatcagtataaaaagaacgaggaacagcaccagacttaacaagagatttatcaatctcaatctgtctaattaaccaatcaacagcatataaagtcttaccattgcctggagcaccagtcacaagatttaacattaagtagtcgccttcactatcccaacatggagagattgcaacgctaagcgagtcaacatggcactaccaataattgacaacgcctcaccaaaacccattaacaaagcaatatttaatacatccgcagaaataccagacatcttagaaacaataagattcaacgcagaagtaacaagaggaattaaaggaacagtagtcaccaaggcaagaccagcacccactaaaccacgtgcaaccgtctgacccaaaatattacgcaacaacattgctaaccaactaaacattcttcaccccacgaaaaccaccggcaatataagcagcaagaatcgtagcaatcacaatcacaacaggacgcattaaagcagcaaaatcacagaaaggctgataagaaatctcaacactcgtcttataacctgaaaactctataggaatagtcgtgggagaaggacaagcgccctcccctaaaccagatgaccaagtcttagcctgaggtaatttatcaacataaggaacatcaggaggaacaagaggtttcttcaaaaattcatcagacttaacccaatcaataaaatcacaaacaacactagcccaactacaaaaagacggccaagccgtaccagaagaagagggaggagaactagcaccaccactagatggctgctgatcaggagcatgagaagccttcaactcatcctctaaagaacgacgcaacttattcaaagcagaaacaatctcaggagtaagaagaacagcacccgtctgagaatcggttaaaacagcattgactgtagaaggatcagaacgaaccaactgccccaaatcagtatcaagaatcacagaaggaggtaaaccagaagaataatcaggaactgattgatccgtcttactcagatgaccaatatattcaccccccccttcaagatgatataaccacctctcagaactaacagaagaaggaccagaactagtaacaagaggttgtggaggagaaagagaactttgataagcattaataggagcgatcaaaccctgaggagtcacagaataaaaaacatgaccatcaccgggacgctgccaccaccaagcaacagtaccaacaggaatctcttttaaagcaggaccactcatcacttcatgcgttaactcatcaatgacccaccctgccccattaatcaaaccactcaacatagaataaacattataaaaggccatcccacggcgaacggcaacctttgcaagagaacctaatgttgaagctgatatatctacaggaacagtataatacctaacaccattcaccaaagcagtagacctagcctcaaaggtagcagaagtactgacaccatctgaaataacagaagaatacctaacagaagtaggaacaacttcaacagtaggaggaacattctgagcaaataaacaaaaaggaaacgaaatgactaaagtcaaccctaaggccgaaataaaatataaaaagaaagaacggctacacataacaccaaccaaacatccataacaatgctccaaaggggagaagaacacttctccccactaaaaaaacatcatccaaatatggcacctttaagccacttccaaccgacagaaatagccgcaggagcaagcttagcagcaccaataagagcaacagcaccagaaatagcacccaaagcagtaacagccgcaccagcatcaaaagaagctcctgcggcatcagcagcaaaaactaatgaactagtagaaagtaaagaaaaaaaagcaataccacgatcaatataagatttcataaaaacatcctcataataaaattaatcacgaactacagtgaaaagaaaatgaaacccccaagccaccaaaaaacacatgacaatatgaggcaaaagaatacgaacatcctcataagaaatgggaggcaacaaagaaggcggaaccatccaagcctgttgagaacatgttctagcctcaacatcatattgcgtacaatataaagacattaattgctgtgccacaactcatcatcccttagcagaaacactagaagacgtaagaggaagctttacatcaactaacgtcttcttacgagataattcaagcccaaaacgacctgcaacaaggtcagataccacatcccataacttaacagctccgacgggataaccttcccgcaatccatcgacaacaacctctatctccatcctcatcttttcacaatccaattcagcacgttggctataaatcggcatttgtgtaccttgttttgtagtcacagtgcgcatagtgacatcagacttaatcgttacttttggcatttgcatttgcattcactcaccctcattgattgatcgattcactcattaaataacttaaattaatatcgtcgtctctcgtctctcgtctctcgtctctcgtctctcgtctctcgtcatctcatctcgtttcgtcattacatcaatttcggtcgctactgtggggtcaagctaagatccccccttaccccccgcaggagacaaggtagaactgctttgaacccacagtgcggggcttgccacctgccaccgggggactggataacggaccaatcaccggattacttaccgctgtcacctgtaatcaaggcgccctgctcgggacgtgggctatagtcgatcttcggtggcacccacgccccgaaattacgtgacacatcgacttcaccgccctttgaaacgtacttagagacataaccggtaatatccatctggctacgcggagcctcgatacgattacggccaaactctcggtaccaaaactcgtgccactcataccgactcattaaacgattaatatcctcatccggcgcagccaccaccgcatgaaaatgtaaccgcccatcacggtgccactcctgccctctggcccattgaataccgcaatgagaacgtttggaccacacacgaccatataacgaacgattaatactactgacaaaaaatcggaacgctttatcagcggcctccggatgcatactgccattagaaccagaattcgtcggtcgaaacgttaatgtccaaaactgctgccaggaactgcgacgtaataaatcagcataagcttgggattgaaggcggaccccggattgattgaattgggtagttaataattgacataactgctcatcactctcggcaagagacatctcccctacttaaaagattaagactaaaatcaccaagtaaataacgttgataacgaatttcgtcgaaaatcgaaaaaacaaagacagcacagaccattggaattaaaacccaacggaaagaagaaaaatacaacacaaaaacaaaaagagaaaaaaggaatgaaactaaaaaatcaaaaagaatagagattgaactataaatcaccctaaataaaaagcgagaataaaaaatcaacttgtcgcgtcccaacagactaatcataaaaacgactgccttaataagacacactcatctaattgctccaatgcagcagcacggacagttttccaaaaatcaaaatgctgaggcaaagtatcttcccaaaaatccatttgacaaacgtacatctcagcaatattcaatgccatacgtgcgccgcgttcagtatcagtaatacgcatagttcaccgcaaaggcaacgaagaaagatgagttaaacgagcttctaaagaaaataattcataaagaatatcagctaaagacagagatatagattcaactatcttcaatgtaatttcatctgaaacatctgaagcatcagtaaaaatcttcgataaagattcatcaataaaatcaatataacgctgaagatcagaaataaatgaagttaaagaagaaatatactgatgagcaaaaagaggatcagcatctaaaacagatagtttagacatatcgcatcgccttgattaaacgctgtatatgtacagattttatatcttgagaaagatgaaacaacttgatctcagcgtccaaaatagccgaagaaataccactccttcttttaaacatttctatatcaaaagctcgaaaatctaattcctctaatttcctcttagctaaaatcaagtccttcactatttcttcaataccagcaaataaaagatcaattctaggagacggattacaagacttaccctgatcagtcaccggaacaccagaaaccactgatacttcgctttgatcgttcaacatctcaacactcctaccgtgccctaccctgcctaagaacacctccccatccaggttaggatgaatggagaggtgggcgctcactcaaaagagagcaacaaggagtgtactctaataagagatcaatgcaagcctttcagagaacgttatgcagcaaaaactactaattgacctagcaattcagcactcgttaagaaatagcctgcgtggacttgcagaacaaataaatgtctcaagtggagtactaagcgaatggcgtaatgaaataaaaccaataccaaacgaacgcatagcccaaatatgcaaaatagcagagacagacggtgcaacatggatggcaaaaatccacgcggaaaaagcacaatcaccaatagaacgtgccatatggaaatcaatgctagaacggctaacggcaacagcggcaacgttactaataggcgcaggcattacctaccccaccccatctcaagcacacgcactagataagaatttcagtaatggaatttcacataatgcatattatgtccatcaggtggacgcttataaagcgcgatgtttagcttcaccaaagaacggggtgtgatgactgcaatcgtttaagcgtactacttgtagttggtcaatattctttccttccaagaggttcagcgtagtcggtgcttgatggaagcgccataaatgagccaatggcaatcccagcactcgacacaggatcactcggttgactgcatcatgcgcaacgactaataagatatcgtcaatccctaatccaacagcggcggttgttaaaccacgccagctgcgttctagaacttggtgcagtgattcaccgttaggcatgatgactgtctcaggtgctttacgccaagcgtgcagccgtgtgggatccattgcatgaatctcagtatctaaaagaccctcccagtcaccgtgggaaatttctttcagatccgcctcaatcaataactgtgctgcgcggctttcacccaaggccagttgcgcagtgtattgggcccgtaccaagggagatgccacggcacgagcaatgactacatcccgtaggcgctcaccaagggcacgcgcctgagcctcaccaacagaagaaagaggaatatcaatttggccttgatagcgaccttcagcattccaaagtgtctctccatgacgagcaagcaaaatacgcatgctataaaaagtctcttaatgatgggaaagccaccgtcatcgcaatgacggcgtttgcagcagtttaacgatacaaattcaattcctttagtagatgtggtgctggtgcaacttcagtcatgatccactgcacataacgactatcaactgcaattgttcgagtcatcacaggatcaaacacccaattactactgacagactcccaattaccgtcaaatgctaaacccaccaattttccgtgggcatctaagactggcgatccggagttgccgccagtaatgtccaagtcagatagaaaattcacagggacagtgccaatacgctgatcggctaaattggcgtagctctttgcctttatcgcattaatcagtgacttcggtgaatcgaatggctcgacgcctgtattcttcgccatgacaccctgcagtgtcgtaaacggtgtgtactcgacgccatctttgggtgaatagcctttcacgtggccgaaggtaatacgtaatgatgagttggcgtctgggtaaacaaatttgccatgactcttgttgtagtcagctaaggcttgcaagtagatcggacgcgctttaagtagttctccagtacggattttattctgacgttcaatctccagtaatgctggcatgatggccacagcataacggatcgctggatcttgactgctttcgaaggctgcacggtcggcattaaaccacttcagcctttcctcagaactgcttaatttggtgtcacccaagcgcttgagagttgctgggatgccatctcccaaccaaacatcaattgcagccacacgctgtttgacaggaagcttgttgtattcggtgagccagtattgctgcatctggcgatccatttccggtaagtaacgtcgctccatctgctttaagttgccttcaatggttggcagatcgcgctcctgatatcccgcttcacgttgggcatcagattttgtgcgctcgattgccaagcgatataggttcaccgctacaccaatgacaccacttccgttgaactgacccaatacaaaatcacgatcctgatttgctttgtattgttctgtcagatcaaccaatgtttgatgcgcagccaatgcttcgtgtccacgtatgccctgctgtttcaaccaagctaatactgctgtttcttcactctgtttctgacctatagcattaatgcgtcggaagccatccaattgaccatcaaagtttttcgatgtgttattcaatccagctaaagtgctcgcatatttcacttgaatgtctggattctgtttgctagccgcctcaatcaaagcaatgagattcttgaaatgctggccaatcaccggataagtccagtgagcagtattctcaaattcggccaccaaagcataacgattggtacgtcctgggtaaccagcgaccatcacgaagtcaccatcacctaatggttgatcgctaaatttcagccagtgtttgggacggtagggtatgttttctttagagaagctcgctggtttaccgtctttaccgacgtaggcacggtagaaagaaaagtcaccggtatgacgcggccacatccagttatcgacgtcgcccccgaacttacccacactcccctgcggtgcgtaaaccaaacgcacgtccttgatctccaggttcttgaacactctgtaggtatttccaccagcgaaactgaagaattggcagcgataaccctgctcttcctcgcatttggcgatttcttgtttgctgaatgtctccaatgccgtcgtacgcttgaaggggtcattaccggcagcagccagagcagctttagcttgagcggtgacatcggtaatctgctcaagcacgtaaatacgcgcattcggacccgcactgacttcatcagcctgagtcaacgcattgaacccttctttgattaagttctttttaggcgtagagttcaactgaatcgcaccataagcgcaatgatggttagtgatcaccagtccttctggtgaaaccagactcgcggtgcaattgccgagagagaccactgcccccatggggtcacctgtcaaatttgacaattgttctggtgacagttgtaggccagcctgctttagagggccagcaatttccggaagctgttgtggaacccacatgccttcgcccgcatgagtggagtcgacagttatcaatgtagctaaaacggaaagcgacaacaggttaaaacgcatcagtaatcactccatggcacacagtaggtattgcaatagtgtaactctgagcagaagtccattgactacgaaatgtgaaaaagtgggctgaattcactaagggattcaactgattcaagggattcgagtttgctgaaactaccgagcaaagcttactgaagataacatcttcaactatcgacgtttaatttagccacacctcatccagttttgttcactgttatgttctaatttgctttgaagcgggggtaccatagccaagctgcggttgagacacacccttcgaacctgatccggtttacaccggcgtaggaaagcttcgtggaccgcgccgcacggccaccctggcagaggcgtaaggtgccgcgccgccgcttcgtcccgtcactctctggacgaaccatcgtgaacatcaccactgccctcccccttcccacccacttgctgtcggagaaggtgactgcacctttacttggcgcacgcaaaatttacattaccggatcacgccaagatatacgtgtgccaatgcgcgagatcgcactcacacccagctcagctcgatacggcggaaacgagaatctatcactggcgctctatgacacttcggggatttacactgatccgcaagctacgattgacttggcgtgtggtctacctcgattacgcgctgcttggattgatgagcgtgccgataccgtagaagctgcgttgtatttcaaagtacctgagtcggtatctgtcaccgcaccgcctttccctacagcgccacggccacggcgtgcacgtgacaatgtcgcggtaacgcaactggaatatgcacgacgtggcctcgtcactccagaaatggagtttgtcgctatccgtgaacaacaacgccgtgaacaaactgtcgaaaatcttcgtggacagcgccatgcaggtgatgcctggggggctttggttggcacacccatcactcctgaattcgtacgtgatgagatcgcacgtggccgcgcgattcttcctaataacatcaaccatcctgaaagcgagccaatgattattggccgcaactttttgacaaaaatcaatgccaatattggaacatcagccctgtcttccagcattgccgaagaagtggagaagctggtttgggcgatccgctggggcgcagacacaatcatggacctgtctactggccgtgacatccatgctactcgagaatggattctgcgtaattcacctgtgcctgtggggacggtgccaatttatcaagcgttggagaaagtcggcggacatgttgaagctctgagttgggccgtgtttcgtgacactttgatcgaacaggccgaacaaggtgtggactatgtcaccgtgcatgcaggagtcctccgagactttatccccctgactgcttcacgtttaacaggcatcgtctcgcgtggtggctccatcatggctagatggtgtcaggcacaccgcagcgaaaacttcctatacacgcatttcgaggaactttgtgaaatcatgcgtgcctacgacgtggcattttctcttggtgatggattgcgcccaggctgcatcgctgatgcgaacgatgcagctcaatttgccgaattggagattcttggcgagttgacccatatcgcctggaatcaccaagtacaggtgatggtagaaggtcctggacacgtcccaatgcatctaatcaaggccaatatggataagcaattagccgcctgtggtgaggcacctttctacacgctaggtccattaactacagatatcgccccaggttacgaccacattactagtgcaattggcgcggcaatgatcggctggtatgggacggcgatgctatgttacgtgactcccaaggagcaccttggcctgcctaatttgcaagatgtccatgatggcattatcgcctacaaaattgcggcacatgcggctgatcttgccaaagggcatccagcggcacaggcacgtgacgatgcactctctaaagcacgctttgaattccgctggcaagatcaattccatctcagcttggatccagaaaaagcactggcactgcatgatgagagcctccctaaagaagcgcataaacgagcagcattctgttcgatgtgcggaccgcaattctgttcaatgaaaatctctcaagaggtccgtgacgcttcctctaacgaattgtcagatggaaatacgaataccaacgacgctatctagcattcactgtgtctctgacatcggaaccaacgacctgttccgatgtcaatcactttatgttctagattgactctcactaatgttcgttacactaaaactccttccctaatttttctcgcagaacgcacaccatgtctcccgccttcggtaccgaaacggtgatccatgtccatcactggaccgatgcctacttcagtttcattactacccgtgactctgggtttcgcttcgagaacggccagtttgtgatgattggtttggaaacagaagcacgaccgcttttacgtgcttactccattgccagcgccaactgggaggagcaactggaatttttaagcattaaggtacaaaacggcctgctgacctcacggctacaacacatcaaacctggagacaaaattctggttggtaaaaagcccaccggcacactattgattcacgatttacatccgggacgtcatctgtatttactggggactggtactgggcttgcaccctggctgtcaatcatcaaggacccagaaacctatgagcgatttgacaaagtcatcctgactcatggtgtgcgctacagtaaggatcttgcttaccgtgactacttcgaaaaggaactaccgcagcatgaattgcttggcgagacgattcgcaagaagcttctctattaccctgcggtaactcgtgaggacttccctaaccgtggccgcttaacccacctaattgaaagtggcgcgatgcaaaacacgcttggtttaccaatcattgatcaggccaacgaccgtttcatgctatgtggaaacccgcaaatgctgactgatctacgcaccttattgaacgcacgtagcttcaatgcctcagcacgtataggtagccccggcgattacgtatttgaacgtgctttcgttgatcaatgagtattccctcccccttcctcccctaaggcacgaacgatatgcacctccaattgctccggtgacttgattggcgaataacgggcaatgggttgcccgttgcgtccgatcagaaatttagtgaagttccacttaatcgctgccataccgaacaaaccacggcggcgatgcttcagccattgccaaagtggatgtgcatctgctccattgactttgatcttcgccgccattgggaaatccaccccatagttcagcgtgcaaaactcagcaattttggcctcatccccaggttcctgcccagcgaattggtcgcatggaaagccaataacaatcaaacctgcatcgcggtaacgttgccatagcatctccaacccagcatattgtggagtaaagccgcaacgcgacgccacgttgaccaataacagtacttgtccacgccaatctgctaatgcttgaggccgtccgtcaagacgtgtgaaagtgaatgtgtagatgctgctcataggaaacctatctaacgatagaagtgacagtttgctagcaaaagcatggcttacatgtgtgtgcatcctggttgagttactctgaactttaacaatcgccaagcatgtttagttcagtggatacataaataatctcagtacgttgcaaaagcctaaaacgacatcaccaatacagatatcatgccctactgattgttattcatttatgcgagcaagtcatagaaaacgcagggtcaatattggaattcatccatccatgtattacttattttcgtaataaatttatcgtcaaaatgagtttgacatgaatctcctctttggtgatgctcacgttttatacatataaatcagtgatcattccttttcatcctgaatatacgagagatcttcaatgagcgtcgacactaccgtgaaaaacacggtgtatcttgcgacaccaccaacacagcttccaaaatttgaaactatttttggccatcctaagccactctggatgttattcatggccgagttctgggaaagatttgcgttctatggcatccgctgggcactcacactatacattgtcactcaattctttgatggcaattctattggcgaagggaatgcaaacagtacatatggtgcttatttagctttggtttatgccagtgcgatctttggcggctttatagcagatcgaattattggctatcaacgctcaattattattggtgccgttatcatggcttgtggactgttcctaatcacagtaccaagtagaaccatgtttgagataggcttagcgactatcgtgattggtaatggcctttttaaacccaatatttcgtcgttggttgggcaattatatgctgaaggtgatacacgtcgtgatcgtggttttaccattttttatatgggcatcaatgctggttctcttatctcgccactaataacgagttggcttgcaggacaagtattcggtacaccgatgcaacaaaactacaaagtagtgttcatcgcatcaggaataggtatgtttttaagcctattgtggttctggataggaaagcgtcaattaaaagggatcggtttaccacccaaagatggggaaagtatattccggacgtttttaatcatctttggggcactattggctattccactagcctatctattattagccaaattaaacgctacaacactggcatggattcttggcctactttttgctgctttggcaacattattgatagtaaccgcattacgtaatgggaagattcaaagagatcgtgtcatcgcaatgctgattatctttgtttttaatgtcatgttctggatgttttttgaacaagcaggaagttctttcaactttcttgcaaaaaatattgtggatcgacaaatattaagcaactgggagttccctgttggatggttccagtcagtgaatccacttgccattattttacttgctcccatcattgcggttatttggtcattacttgataaatacagaatagaaccctcgattccacgtaagtttagtcttggtctgatgtttaatggattcggattcttaatcctaatgtatgcactatctaaccttttgaatgcctctaacatgattcccttctggtcactcatcgctgtctacgttatacagacagtaggtgaattatgcctttctcctatcggtttatcgatggtgaccaaattggcaccagtacgtttggtcggttttgcaatgggcgggtggttcttatccactgcaataggtaacaatctttccggtgttttcgcaagctttgtgagtggtgaagaagggatgactgtcagttcagcgttgcgtggctataccttcggtttctggtcactcattggttccggaatactgctttttctaatctctcctctgattaatcgcttgatgcatggagttaaatagtcgaataaaacatgattcgacgatcttcgctttgatgagcactcgcacctaaaattcttctgtaggtgcgagtaccggcatcgttacaaatcacaggtaaaacgcgtaatgaaatggtgttgtgtcgtggatacctgagatattttttcaccagggatattttatagtagggacggtaagtcactgacgattttttgaccacgtcgcgatgccagacgatccgcttgccgagtgggttctggtagacgatagccattaagacagcgctgggtccatgtaagcgcgctatgaagtgaaattttatggcctggtgaaatcatcagcggtttgcagcgtatcttgctgcgcaatgcccaaccaacctgggtcccatgcaacagaatcggagtgtgctcaccgaaggcggtacctggttcgacaaaatcgccaacgaggcgctttttagctacgccgatacaaggtaggttggtcactaagccaaaatgcgcggcgatcccgagccggcgtggatgcgcgattccatgtccatctacaaatacaagcgctggaattcgtgacaattgggtcagagcttgcaggagtgcaggcaactcgcgaaagctgaggagtccaggcacatagggcattgacgttggtacacgtacaacatgggtttctaacaactttaaatcgcatgcattcattaaaacagcagcagctcgtgtcgtgcgtccttcgtcctcaaagccaacgtcaaaaccggccagtaatgttggttcagacaatagattaaggtcgtccttaagcacaatgcgttcggccatgtcgctttgcaagcgtcgcgcctcggtaatactgccatcccagcctgcaaagatagaatcaatggatgaaatcttcataaataccatcatgcctgtatcagatatcagagcgtatacaggcaatctcgacctgacgttacaatcacgttttagatactttcaattcaggaaagctgcatgactcgtaaacttgtattgctacgccatggacagagtcaatggaactcaatgaaccgttttactggctgggtggatatagggctgaccgaacaaggtcatcaagaagccactatggctggtcatctgatgaaagaagaaggactagagtttgatgtcgctcatacttctttacttaagcgggcgatccatacattacaagacgcacttaaagcattggaccaggactggttaccaatttataaaagctggcgtctcaatgagcgtcactacggtgctctacaaggccttgataaaatagataccgcagctaaacatggtgaagagcaagtcaatatttggcgccgctcctatgacatccaaccgccgccgattgatctagatgacccaagccatccaatgcgagaccgccgttacgctgctctggaccgcaaagtattacctgtgacggaatcgctgaaaaacacactcgaacgagtattaccgtactggaatgatgccatcgcaccacaactaaatgacaacaagacggtacttattagcgcccacggcaactcattgcgtgcgttgtacaagtaccttaatcaagaaagtgatgagaaaatcctaaatgtcaatatccctactggcattccacttctatttgaactgagcgatacactacaagtagtgagttaccgttaccttggtgatccagatgcagcacaacgcgcttccgaaatggtagcaaaccaaggtaaggcgaagtaatacgtagttttttacgatcacaataaatactggatactaccgaacgctagactgcaataaaaactttttgcagtttccaaaaagagtagtgaatcacctcagcgccccggctcgtcattccacaacaacttgtgtaattgcagctggaagcgtactcctagacggtcggaaataatccaatcagcgagtacagtgggtgctatatcttgcttgcttggagagaaccagaccatacaacgtcgttctagttcatgctcagcaacacaagtacgcgcccactcatagtcggcacggctgcatagcacaaacttgatttggtcgtgaggagttagcaacgccagattgggccagtggttgcggtgcgcctctccagacccaggggttttaatatcgactacacgcgatacacgtaaatcaactgcagcaatatcgagggcacctgaggtttctaatgaaacctcaaagcccgcatcacataatttctcaagtaacagcaaacaacgtttttgagcaagtggttcacctccggtgacacacacgtgacgcacaccataactgcgtacctcactcacaatagtgtcgatactgcaccactcaccgccgtgaaaggcataagcagtatcacagtactgacagcgcaatggacaacccgtcaggcgtacaaatactgttggccaaccaacgctattagcttcgccttggagggataaaaatatttcggagatctttaactgtgacctggtggcattcattaatcgattattatgccgctggtcattcaaagcaaagatacgattactcagcgcattgcctgacttaacttaattgattgtaagcgctcttgtgctagacgcgccgcatcggtacctggatattgcgataaaacctgttctaacgaatgctgtgcatcatcatttttcccctgattagcttggcataaggcctctttaagtaaacttcctgatgctttgtcgtgggttggataacgacttagtaaactgcgaaactgagcttcagcggagacgaaatcatgcatcgcatagtaactctccccaagccaatagagagcattaggagtgtagactccgttcgggtagagctgtaagaaactgaggaacaactcagcggcgtcagcgtatttactgttctttaaagcgtcaaaggcaacattgtaagcaatgcgctcctcgttactgatggttaatgcactcgcatcgccatgtatgttaggcgattgctcgctcattgctataggttgattaaagtgagatggggaaacttgagaaatcgggttagctagaactctagatggctctttgactgaaccactttcaataggcttcaagcgactgtctaaatccagatactgatccttggattgttgcttcagctgctcatagccatgctgcatctcttcaatggaaccttgcatctgacgaatctgcgagcgcaaatcattgatttggttaattagatcgatattaacttgcgggtcagaagcgcgctgctctagtgccatgacacggtcggccaagctggacatctgagcagaagacggcgcgacggtcccgagggccatcgcgacgacacaaaatgtagatccccaaaaacgcatggcttacttcgctgtatagacgatttcaacgcgccggttacgtgaccagcaactttctgttgattcagtgcaaaccggacgctcttcaccgtaactaacaacgttcaactgtcccgacgaagcaccattcgcctgtaatgaatacaacacagagttaccgcgccgttcacccagagctatattatactcacgcgaaccgcgctcatcagtattgccctgtaatgtgatgtgtgcagagggacggttgcgaagatattttgcatggcaaccaagaaccgtttgaaattcttttttcacatcatctttatcaaagtcgaaatagacgacacgttgacgcaagcaagcatcggtatctaagtcagcggctgtgtaaagcccagaagaatcggttggcgccgtagtggtgggtgcgggcgtagaaacagttggtgccatagttttgacaggcacatgtggttgctccttaactttttttgaacaggcgacaagcgcgctggtagaaagcaatgagattaggagaaaacgtgtggaattattcataaagatacctatggtagctcccaagccaatgagtggttaacacatcaaaatattaacattatttattaatgtacgctccggtaaggcccccaagcaggctctcttacatcactatcaaccgatactaggcgctggcgcacacgcgcatccgcagagactgcataaagtactccacgacccccttcacgcgccgcataaagcaccatacttgcattgggagcaaagctcggagattcatccaatgaaccagtagataaagtgttccaaaccgtagatcccgaactttggtccatcattgcaattcggtatacattaccgctcccttgtgctacgacaatcttcttgtcgtcataggagacgctagtagtagcattgtagttgccttgaaatgtcacacgtgtcgctgtgcctccaacagaggcaactttatatatctgtggacgcccaccgcggtcagaagtgaaataaataaatttcccatctgacgaccaagccggttcagtatcaattccgaaactattggtcaactgaattaactgtttgctaaccaagtccatgacgtagatttcaggattaccacttcgtgacagagataaagcgattcgatggccatcgggagcaaacgacggtgcagcattgataccccggaagcttgacaccaattcacgggaacctgtagcaatgtcttgaatgtagattgaagacccccctttctcaaaactaacatacgccagtttcttaccatccgggctccaatcaggtgataacagtggttcggctgaacgcacgatggtttgtggattgtagccgtctgagtcagcaaccatcagtgcgtaccgcattgctccgtgtgaaccactggcagtgacataagcaatgcgggtaaagaatgcaccgcgcaagccggtaattttctcgtagattgcatcggccatttggtgtgcaacgtcacgcatcgcgctagcgcgcgcagtcatcgccaatccaagcattcgcttgccgttgcgaacatcgaatagttcatactcgacacggtaagtcccttgcctggcatcaagcacacgaccaaccacgatgtagtcttgtttcagtgcttgccaagtcggaaatcgaatctcgcttccatgagtagggcgctcaataatttgccctagaggcaacgtacggaactgacctgaacggttcaagtcagcagcaacaacactcgaaacatccgtagctggagcacctacactgtcatgataaggcataggtaaaactgcaataggagtcgctgcggtgttgccgccaacgatatcgattgtcaacccctgttgctgcgtcagagctgataaggggaacaataaaccgaccaacatggccagccagcgtggaaatttcgtcatgtgtagctctataacttgtaagaaaaataatggatgaaaatttaaacggatgccccagaacgaatattttagcaatcgttaacaacaaaagcgtgaacgcaaccattggaaatggtgaccaagatgtgcaaacgcgacaagtagagatcaaagtcagtcactagctaaagaaacagaatgcaagctccatgcagcgagttcttctgtatcgaagtcgcacccagtagagattgcaagcattgctaaagactacggacttattcagtggtcttcaggaataaatttgaaatacacatcacgctcaaataccggctcaaaaccacgataaggaagcggctgtgcgcgcatcacggcactctcaatcgaacgccgtcctgcatcatcgtacggacaatcgggtgcgacctcagcactaagtacacgcccaccaggtaactgagtaatgtgaatcatgcactcctgaccgagaggaacggagggtggacggctccactggccactcactgcctgctgaattgctgctttgtacttatcaagcagccctttgttgtcaacgttttttccagatccctgccccccgtttgtgttgctgactggagagggagaggattgctgagaacgttcagcagctagctgacgcaacttttgttcggctagatcggcctgtttagcgtcactttgtatctgcgtttccaattgctcacgacgtttacgcaattcagtcaattttttcaagcgatcaatctgagcatgttcctcaacctgcttccgcatgatttcttcttgctggcgggccaaacgcaacttctgctcggcttgttgctgacgtttgcgttcctcagtgagatcaatctgctcctgacgatgcttggcttcctgctcccgtttagccatctcttgcgattcagcgagtgcgctaacttgtttctgatcaaccttgtcaggttggataatgcgctcctgcgcctcagtctgaggtgaggtaagcgcattctgcggctgcgacgcaaaaattggttgtggtggagttgtatcttgcagtggtagttgcatcgacacaggagcttgaactggcaagttacgcaatgcctgacgtgcaatacgggtatcgttaacggatacatccaaacttgcttcgatacttgaatcagcatcagaagaagacaccttatgttgcggggaccataaccaagcaagcaaaaacacccccccaataaaggcatgtagcaatagggccatcagcgcgggcaacacaaccccttcgcggcgccgtgagcggcccaagcgtgagtcagcgtgcattggcctctgcttgagtcagtaggctgactttctcaatcttggcatccttgattgcattcattgcggcaatcacatccttataagcaacagccccatcagcggcaaccactacgcgcacgttcttgtcttgagagacaactgaagtcaattttttacccaacgcatccacatttatgttttcaggcttactcttgggtaactgcaaagcgagctttccatcactattgacgatgactacaatcggatcctgcttattctccagtgccttggcgtttgaaactggcagatctacattgatactcaatgtcaacagcggtgcggtgaccataaaaatgaccagcaataccaacatcacgtcgatatacggcacaacgttaatctcagatttgagcttgcggcgtttacggcgatacatgctgaacactactgtcaggctcctgcgtcgtgtgtgatatggttattcgtcgataccaacctgccgttgcaggatagcgctgaattcctcggcaaaagtttcataacgcacagaaagacgctctacacgagtggtaaaacggttgtaagcccacaccgccggaatcgcaacaaacaaaccaactgcggtagcaaacagcgcttcggaaataccaggggcaaccgcagcaatacctgcttgatcgccactactgatcatgtcatgcatagtgaccatgatcccaaacaccgtaccgaccaaaccaacgtaaggtgcagtggaaccgatgtttgccagcaactccaagttccgttctagctgatccatctcgcgcatgaagttagtgcgcatcacccgctgagcaccttctatttggatgcgtggatcgagtcgacgacgctcccgcaagcgcgtgaattcccggaagccgccttcaaagatggcttccaatccactgaccatgtgtttacgactgttcgtggaagcatacagcttactgaggtcagtcccagaccaaaaacgattttcaaactgatcggcctcacggttggcctgcttaaatacccgtgccttgcgaaagataatcacccagctagtgaatgagccaagcaacaacaacagcacaataattttgacgggaatactggctttgagcatgagatcgatatagttgatccccccgtgcgctgttcccgtgagtgcttgagctgctaccccggtgatgtcttgcggcaaagcttccaccgtatcctgtaaggccaggagccatgtcatcatccgttattcctcggtaattcagattatgagagttctaaagacttcaatcggtcgtatagcgcactgttgatcgcacgaggacggaaacgtctagccgataacgctgcaagctgaacttccgcctcaagtaacaactctccgtcacgccggatcgactgtgccaacagcaagctagcatgcttacaacggatcaacaccacagacacttccagcgcatcgtcaagatgcgcagggcggagaaaatccatacgcatggcacgcacagcaaacaccaaatcgtactcttgacgcatacgctcctgtccatatcccatcgttcgcatccattcagtccgtgcccgttcgatgaaagccacgtagcgagcatgataaacaacaccgtcagcacctgtatcttcccagtagacgcgggtcatccaactgaactgcggagtaacagtgctactcatagtggagttctcatggttcaaaacaagtcttctggatcagtaaaagccgacactcgctcacgaggctgcagagcgagatgctggtaggccttatctgtggccatacgtccacgcgcagtacgtaccaagaaaccttgttgaattaggtaaggctcaacgacatcttcaagggtaccacgctcctccgacaacgaggctgcgagtgactcgatcccgacaggaccgccgtcgaaatactcaacgatggtgtgaagcaagcgtcggtctagttcatcaaagcctccttgatcaaccttgagcatctgcatcgctgcttgcgccacctcaattgtaatctgcccacccgccttaacctcggcataatcgcgtacccgccgcaacaaacgattagcaatgcgaggcgtaccgcgtgcacgttgcgcaatctcagctgcaccctccgtagtacagtcgatattgagaatgcctgccgagcgtcttacgatcctagcaagatcctcaggactatagaactccaaacgctggacgataccaaaacggtcgcgcagcggcgcagtcagcaaacctgtacgagtagtagcacctatgagagtgaaaggtggcaagtcgatctttatcgaccgcgcagccggcccctcgccaatcataatatcgatctggaagtcctccattgctggatataacacctcctcaaccactggtgatagccgatgaatctcatcaataaacagcacatcgtaaggctgtagattggtaagcagtgcggctagatctcctgctttctcgatcactggaccagaagtcacacgtagcttgaccccgagttcgtaagcaatgacatggctcaaggtggtcttgcccaatccaggtggaccaaaaatgagtacgtgatccagtgcctcagcacgcgccttagtggcttggatgtagatatccatctgctcacgtacaggttgttgaccgagataatcagccaaacgcttgggacgaatactgacctcaatcgcttcatcctcactggtggctgcggtgtcgatgatgcgatccataaatcaaagtaaggaaaggtaggagagtacggaatcggaaatgctagagaataaacattactcagatttccacttgcgcaccaagttcaaccaaacggtttcctgggattctgaaaaatgcgttcgctggtgccgcattacggtgcatcaatacgaatagcttgtcgcgccagatcggcatgcctcgattagcactaggaatcacggtttcgcggctgacgaaaaacgtcgtatgcatcggatcaaagtcaattcctgcatgatcctttgaacacatcagcgctgatggcacatccggtgtttccataaaaccaaagcggatatggacgcgataaaacccgttgctgatcggctcgatcttcaagcgctcactgttggcagcgtacggtatcttcaacgttttaacagtcaagaacacattgcgctcatgcaataccttgttgtgcttaaggttatgcatcaacgcatggggtaccaccgtcgaatcagcagtcaagaataccgcagtacctggcacctttactggcggagcaagcatcaatccaggcagaaagttgtccagattgatcccatctttgcgcatctcctcgtgaagcaacttacgaccacgcaaccaagtgcgcataaaggtgaatatcaccacaccaagcaataatggaaaccatgcaccgtccatgaatttgataatgttagcgtagaagaacgcaccatctactgcgatgaacacaatagccatcatccacagcatcagacgcggcacgcgaggattagcccgggcatagataatcattaaaactgtagtaatcatcattgttccagtgactgcaacaccgtaggcactcgccattgaggtcgagtcgccaaaacctatcactgttaagatgaccagcgtcagaagagtccaattgaccgttggtacgtaaatttgtccaattgtggactgtgaagtatgacgaacgttcatgcgcgggatatagccaagttgcatcgcttgactggaaagtgagtaggaccctgtaatcaatgcttgcgaagcaatcacggcagcagcggtagcaagcgcaatcatcggatacagcccccaatctggtatcgactggtaaaaaggattaccgatcgctgtgggattgctcagtaccaatgcaccttgcccaagataattcagggccagcatcggcagcacaacatacatccaagcatggcggatggctttagccccaaaatggcccatatccgcataaagtgcttcacccccagtcactgcaagaacaacagcgccaagcacaaacattgaatgccaaccgtgttccaagaagaaatgcagcccccacgagggattaatcgcatgtagtacctctggggcctgagcgatgttgtatacgccaaccacaccaatggcaataaaccaaagcaaagtaatcggcccaaaggttttaccgacccgttcagtaccgaagcgctgacaaaggaaaagtaagatcaatactgccagagtaatcggcactacgaacgctttcatatgaggctcagccacttccaaaccttcaactgctgacaataccgagatcgccggagtaatgaccccatcgccaaagaacaatgaagtaccaaagatgcccaaaatacccacaatgtagatcgaacggctaccaaatggcatcgtacgctgagtcagtgcagtcaacgccatgatgccaccctcaccgtcattatcgacgcgcataatgacagccacatacttaattgtgaccactaacatcattgcccaaaagattaacgacagaatacccagaaccgtgtcatggtttggagtcaagccatagttgggtgaaaacgcctccttcaacgtatatagcggactagtaccgatatcaccgaatacgacaccgattgctgaaagtatgatggtaccattgctattagaggggactgctgtgcaatcacctgaatgagaagaggtagacatggctaataaataaaatgtttgattaataacgtgaatgtagaaaataaaccaagatcagcgtaacgcggcttgaagcgcttttttgatgacactagcaacatcatcgctctcagtaccagcatcacgtgccatacgtgcagcctcagctggcttgtaaccgagttgctgcaaagccaaggcagcttcagacaccgtatcaagattgagcttgcctgaggtggaaataccattgttgaagtctgcagcacggtctctcaactccaccagcatacgttcagcagttttcttcccaattcctgggataaccgttaatgcattaacgtcaccagcctggattaaccccgcaaatgtatccacgctgacgctggacagaaccgccaaagcgatcttggtaccgataccactcacccgctgcaggtggcggaatagccgccgctcactttcgctcagaaaaccgtacaacgcggcactatcatccttctgcgtatagtgagtaaacaaattcacctcgtaaccgacgtttggcaattcgtaaaaagtgctcatcggcacctctagttcgtagccaactccacacacatcaaccacgagccacggtggcgttttgctagtcaaaacccctcgtaagcgaccaatcatacgtgatgctctttacaaaaagccgtatgcttatcacaggtcgccgctctaatgaggagaccaaaaaccacccactggcctttaatcatttccggctccacgcctgcttcgtactgacacctaagcgctgcgcagtagcactcacatgagcatgcgtgatagcgaccgccaatgcatctgctgcatcagactgtaacctaccttgcagattcagcatgacaccaaccatatgctggatctgttgcttgtcggcaccaccgcgaccaaccacagcaagtttgatttgcctggcagcgtactcatgcacaggtaaatcacgtagcactaccgcactgattgccacaccgcgcgcctgaccaagcttaagtgctgagtcagcattcttagacataaacaccttctcaatggccacttcctttgggctgtactcctcaatcactgcgctcagacccaacaacaactgcttcagccgccccgcaaaactactctgacctagtagtaccaatggtgcatggtagacatggcggctacatccatactcatcgacatcaatgacaccaactccagtgcgctgtgatccaggatcaataccgaggatacgcgtcatctgataagcgatacgagaagacattaagacacagtgatcaatgatggaagaacagttcagacaaagatggagcgtatccatagcaatcaacattgcgatggattttgtaagtattcatctcaacgcttgcccaacgtcacttgatcaacgttggaatacacgtcctgaacatcatccaagtcttccaggatatccaggagcttacgtacctgtatcgcagtatccccatccaccacaatgtcactatcggcacggaaagtaatctgagcatgatacggcatcaaacctaacgcagccatctcttccttaacacgtgagaaagcttctggagtagttatgacctcaatctcatcatcttctgtgtagaccattacatcttcagcaccagcatcaattgctgcctcggtgatacgctcttcatcagcaatggcatgagcgtagctgagcacccccaaacgcttgaacatgaaggcaactgaaccttcagtccccatattacctccacatttggagaaagcatggcgcacatcggagacagtacgcagccgattgtcagtcagacagtcaacaatgactgcaactcccccgggagcatagccctcgtaacgtacttcctcgtattgaacgccctccatctcaccaatagccttctttattgcgcgttcaataacatccttggacatattcgacgccaatgccttgtctatcaccacacgcaaacttggattgttagagggatcaccaccaccagcacgagcagcgacaccaatttgacgaatgatcttagtgaaaatcttgccgcgtttgctgtcagaagcatttttacgggcttcaattgaggggcctcgacccatgggccttcaggagtgcattgataatggaaacgtaattatagctgcccaagtatctatgcggtgtaagaactgctcaggccacctccgcatccttctaggatgctcgtcatcgttgcgctccttattcctttctatgtcacttttatagctcctggactatcaatcgaagtcgcttccaaagccactttaaaagtatcgcgaatctgatgagtagaaggaatcgcacttacatcccatcgaattaaccgtaatcccgcattttcaatagctttacttttatcaaaatcagccttcttgcgtgactctctcaaatgtgtcatatcatccaattcaataacagctacaacggaagaatccttagcgcacacaacaaagtctgcactcttttgattaatacgattgaaccaatgccattgatgtcctctgcggacaccgagaaacctggataattgaacctgacataacacgatatgacctggcaatgcttcgattaaacgccaatataaaacctgctcaggactagtcattacacgtttaggataaaaaggccattcggaaggctcggaagataaagattctttctctgaagatcctaatgaatttttcttaaaaacaacaaaaaagaatattaataatataaaaaataataaaattaagagtatcacatgcgctccaatcaataatatcaaaaaggtttcatataacaataatctgacgcatcaagcgtcaggttcaatatacccttcaggcttggcgacgcggcgctcaaataagaacttattgagttcctcttcaaggaatgcccgatggcttggattacgtggagataacctgttttcgttgataagcatggtttgatgcaccaaccaagcagcccagccaaccttgccgatacaggcaaaaatcttttggcccagctcaccaggataaggcacgaagtccaaaccttcggtatcgcgttgttcgtattcacagaagatgatgcgctgcataggagaatgtgtagcagtgactgttaataaaagctcatagctcattgagcaatttgcggattggagcgggtaatccaaacatgggtagattcgtccgtgtgacccaacgtaaaccatccgtgttttccaatcccggatgtaaggcaactttacgcatgtaacgtggcttcagataaacgcggtagtggctgaaagtatgcacgattgggtccagcactttggctaggtcatagtctgcattggtatgttgagcgcaccaaatacgcaactccgcttcactatcagcttgcggcaaagtccaaagtgcagcccaaattccattcaagggacgccgttgcaatagaattgcgtcatcatcattttgtaacagcaacacaaccgcttcacgctctggcaacactttactgggtttgggcgttggtaaggtctcagtcaaaccctcacgccaggctacacaaccgtcttgcaatgggcagattaaacatgctggccgcaaccgggtgcataccgtagcaccgaaatccatctgtgcttgagtgtagtcggcaagacgtcctgtcggtggttgcagcacatacgcttcggctagttcccaaagctctttttcgatcattgattgacctgaccaaccaacgatgccatgcaagcgtgacagtacacgcttgatgttgccatccagaatcggagcacggtcgttccatgcttgagacagaatcgcagccgtagtactgcggccaataccgggtagtgcttgcaaagcattctggtcacgtggtaggtcgccaccatgcagctcaacacagcgcttggcggcggcatgtagatgacgagcgcgggcgtagtaacctaaaccagcccaatgtgccatgacagcgtcaatatctgctgctgccaactcgggcagcgttggaaagcgttctaaaaagcgtagaaagtacggaatgactacggcaacctgagtttgctgcaacatgatttccgagatccatacccggtatggcgtacgcgggtgctgccaaggtagatgatggcgtccatattgatcgaaccatgtcagcaaacgctgggcgtagagggcaatcatgtaggctggcttgcgagtgggcaagtcaagtgagtagggactctatggcattacctgaaaatgtgcgggcttgcatgcgggaagacgaggccaaatatcttaagcatttcctaatgtttttggcagtagcgcgtctacgaatgcctcagggtcaaaaaaatgcatatcttccagctgctcgcctatgctgatgaagtggattggaatgccaaattcacgtgccaacgtgaagactaccccgcccttggcagtgccatcgagcttggttaccacaagaccagtgacgttcacggcagcatgaaattggcgtaattgcgaaagcgcattttgcccagtagtgccgtcaatcaccatcagtacttcatgtggtgcggtgctatcaagcttaccgagcacacggcggattttgctcaactcgttcattaaaccaatctgggtatgcaggcggcctgcggtatcggcgatgagcacctcggtgctacgcgccttggctgcttgcagcgcatcatagactaccgaagcagcatctgcattcggtcctttttgtgcgatcaccgtaatgctattacgctcgccccatgcctgtaactgcgcgacagcggcagcacggaaggtatcaccggcagccaacatcaagctgtagccatccctcttgaaccacttcgccaacttgccgattgttgtggtcttaccaacaccattgacacctacaacaagaaacacaaatggaagtgcatcgcgtttgacgatcagtggtttagaaacaggacgcagtatcgcgattaattcattacgtaatgcagctaacagtgtttggatatcagcgaattcacgtgctttcatacgtttacgcaaaccgtcaactagggcattagtcgtagacacgcctacatcagccgtaatcaatgcggtttcaatctcatcaagcagattttcatccaaacgcgggttattcgagaataaagcattgatgttccgtgcgaagagactgccacgtaggcgctcacgccaattgggtttatccaccgaaactgttggggtactcgcccccgatgtgtcgtctccagtggagattgctagctctgtagaggcactactcgtagagtgggtcagtaacgcaggctgatctgctgaagatagcaatggcgtggtgctagtttgctcttggtctggagcctcatccagcgaaggagcttttggaaaggcagccgccatctcttcagcgctgtatttgctccactcgttgtcgctgatggcattggtgggcttcttgcggcgtagaaagcttaacattgagcagatgcagatgcggacttaaacaagccgccatggtatcactcaccggaggtctgcacctcgcgacaacaattaaagtcttatagatttttgatcaatatcagaaaaaaggttgatccatgatgatttgtacatactgatggttcgagatagcgattccataaaatcggttaaaaaataaaattttcaagtacgtaaattgaaaattagttttgtgatttgattaattatttagatgaattttgtttcatgaatatgtgccaactagaccgcagtttgaacccatcaacggatgctaagaaaaagaggccaaactacttttttgatagaaaaaagactaaaagattcgtttagtcgtaatcagaaaaggttcaggatggatactcaactaaacccttaattatgaaattctcaatactggcagagtcgagcctcaacaacccttaccacaataagcctatcatttcatagtctttatttaacagaggcaactaaatcgcttaaaaagctctaccgagtaatctattaaaattcaacatcaattactgcctaggaattaataccatgcgctttgcccttaatttgatcgtaagtatgctgtgcgcactactcctggccggatgtgggtcggtgcgtcgtatttccgaacccactgtcaacatccaacagttgagcgtagacaagaaagacatctggtcgatagatctacgcttacaaaattacagcaatgtccccatgcacttccaacgtgcgatgctgtcactggaaacaggcagccaagtggctggtactttggatgtgaaaatcagcttattgattggtccagaaagcgtggatgtgactagcgttcagctgcagccaagcgctctagggaagattgccgtcgctgatgctctagctggtaaccattcgcttccctacaggctgaagggcaaggtatgggcaacattggaaggcagcaacaagtcacgtgagttcgagattgatacgcgcaacatgctcaacatgacccccggcctgcctggtgtgcttcgctaaagttttagattgtgcacttattgatcatctctgtaatgatccaagcgacgccattcggcatcaatcaagctatctaaacacgttaagaatgcccctgccctgctgctacctcgctcatcatcacatgaatgaaatttaaaaaatctgataacaaaaataccaaaagagatacacaaactgccactaatcgagtataagcatagtcctccttatgcagacagacactcagactatacacgctgatcgacgcagaacttaactatggttactgtgctaagtgtttctcccttcttgccatctcccagtagtgcttcaatgcgtttcctgtcactagatgcttgtggccgtgtacttgactggatcagttggcaagatgctgcttgtttgtacgtgcgcgatgctgtgtcttggactcttggagatccatgcctgtcaatccacggtggcatttcgcgtttgactggtcaacgcagcgtgattgcgttgcatccaatcattgcttcacgcggtcacgcaggtacgtgcgtaccggttccaaccccagcactgaccaaccaagccctgttcgcccgtgatgaccatctatgcctgtattgcggtcagcaattcagcaggttccagctgacacgcgaccacgttattccgatttccaaaggtggcttagatacatgggaaaacgtggtcacggcctgttttcattgtaattcactgaaagctaatcgtaccccgcagcaagcaggcatgccattactggcagtgccataccgcccgagctggatcgaacacctgatcttgtctaaccgtaatattctggccgaccaaatggcctttctgaaggcacagttacccaagcgttccaaattatcccgcaactagtaaggccgcagtaaccggatggtcgggtccgttttcatgctggagtatttcagcgtgacaaagagataccagcattcagaaaccccgatgggatccggaacaggaacgttgcaggtggcctaggcttatcctcatgaaccggaaccggcttccggaagactgaagaattcacgtgcgaccactgtactacgagcggcgcaggtcaccacatcttcgccccgattgcgcgctagttcggtaacgatatgagggagaaacgccggctcattacggcggtccttaggcaacggtcgtaatgtacgtggcagtaaataaggtgcatccgtctcgatcatcaagcgtttttctggaatatggcgcaccaattcccgcagatgcatgccacggcgctcatcgcatagccagccagtaataccaatgtaccaatcatgatctaggtaatcgaacagctcctcacccgtgccagtaaagcaatgcacaacaaccgggccgagacgaccctgaaagccacgcatgatcgccataaaatcgttatgcgcttcacgttgatgtaaaaacaacggcttcccattctcactggccaattgcaattgccgctcaaacgcgtgttgttgggtccggtgcggacaaaaatctcggaagtaatccaaaccacactcgccaactgccactacttccttatgtgcatgcaacatccgcaattctgcgtcgcattcatcggtatattcagcagcacaatgcggatgtacccccgcagtggcatatagcaagccaggatgacgctgcgctaatagcaacgcaagagatgaatgtgtgcgattgctcccggtcaccaccatctgcactacacctgcctcataggcacgctgtaacactgcatcgcgatcgtaatcaaatgactcgtgggtaagattggcgccgatgtcgatcaattgcatctaacaaataaaaacctgaacacagagccgcagcattgtacggtatgctttcggtgctttctgctatccatagtgaagtgggaacgcgctttgcgctgctccttatcgccctcgcctgccattggcttctaacgaacagcttgggtagatcgaccaccccatgaagaaaattagtttgggtagttgaattaacatgccgtactgatgtaccattacatcagatcattatgatcaatttattctttaaccatgattaaaatactaacaactactacagatgtacctctagatggaagtgatctaagagaaaatgcctttttaatctatcgaaaactgttaaaaaattttgatagcgatcaattgatgcttttagagtctttggggataaattcggttgactctcgagtttcgatggtaggcataaacccgatcattactgttaatgtaaaaaataagacgatatcaatacacagcaatcctatcttactaaaagaattaaatatagctgacagtatcgcttcacttcagacaacaacattatcactgtccgtctatcaactcgtcgataaaaagatggtatggcaattcctaaaggaatttgagaaaaacttttctcaagtaccgacgcatcaatgcggaattatggctttctcctgcttttcttatgaaaccatccattacatagagacaattccagaaactgaactcaacgatcaagatgaccatgatataactttaatactttaccaatcacaattagtaattgaacaaaacaaggctgaacttatcacctattctttccctggtgttgaggatttttacgttgcgaatattattgatgcaatcacatgcatgactgatgttgaacaagtacaagataaaaatattgattttgaagtaatacaagaaacaacacgtcatgactaccttgataaagtaagaaaagcattacaccatgttactgtcggagatatttaccaagtacaaataggacagaagatccaagtaaaagcagagaccacaccgcttgatgtctatcggcgattacggatattaaatccttcaccctacatgtatttatttagtataaacggtcagacagtcattggcgccagccctgagttatttttgcgcatcagtacggatgaagaaattctcatgcgtccgattgctggcacattaggaaaaagagagggacgcactcttcatcatgcaacacaacatttgcaagctgacaacaaggaagttgctgagcacatgatgttagttgatttatgtcgtaatgatatatatcgcgtctgtactccagaatcactcaaagtttcaggcgtattggagattgaagaatactcgcatgtatatcatatggtttcgacaaccaaagcaatgttaaaacaaggactcgacaaatacgatgtgatgatcgcatcgtttccagcgggaaccatgactggagcaccgaaggttcgggccatggaaatcatctcagagcttgaggatagccagcgcggtaaatatgccggtgcgctcggcatcctaggcattggatccaactatatcaatactgcactttgtatccgctctactgtcttaaaaaaccaagtctataccttgcgcgcatctgcagggattgtttccgactctcaagaacagtctgagtacttagaaacacttcacaaaatgggatctatatttaaagcaattactggggaagaaatttcatgccatatcgagtcatcgtcgtagatgcttatgacagttttgttcatatcttggtctcatattttgagcagctcggttgcaaagtcactgtattgagaaaagatgatccaggcttgttagcacttattgacccactttatagcgacataatcgtactaggaccaggaccaggaccaggacatccatcacaatcaggttacgatatcatcctaaataaaaattcaggacgattacctgtgcttggagtatgtttgggccatcaagcgattggcctatattatgggtgcattatagaatatgctaaaaatctgatgcacggaaaaacaagtttgatcaaacacgatggtcaaggttgttatgtctccttaaatagtagaacgttgaaagtcatgcgttatcactcaatcattgttgcaaacaaagatattccaagtcatatggccgtgacgtcttactcaatagacgataattacattatggggttacgacatcaacatttaccaattgaatcagtacaatttcatccggaaagcattgctaccgaatgtggcttggatttgataaagaactttattactacttatacttttaataagaaaggatgcaaatatgaagaactacactaatcgtgaaaaattgaacgcatttcaaaagcgttatgaccctattactacagcttatcgtgacctaacgctgacagaaaaaactcttcaaaagtggaaagaagaacaactcaaaattgttattgcacatgtaaaagaaaactctcctttttatcgtgatcatttacgtgatatagaaccatcaaagctcacattggatatattacataaattaccattcacaactaagaatcatctgcgtgaacagatgcagcagattctttccggctctctgaatgatggcctatactactacgaaactacaggaactacgggcgtagcgacaccttgtccacgtgatcaaaaagaaagctatgcaagtaatctccaactacaatatgcctatgaagatatacttaaagagattttccctaccgatcataaaccaattctaggtattctcggcccaactgaaatccattcattcagcgatacattgggttctatcgctttaaacattggcatctgtcacgctaagatctggccaggctcccctgtgataggttttgacaaatgcctgaacctcatacgagacctcaaggtagagattattgctacttcacctggacaggtaatgactttggcaaaggaagcaatgaaacgtgggttagacccaaaaaaagattttcacgttaaagtctttatgctgagcggtgaattatgtacaccggagctagctgaaaatctggaaaatttatggaatgcaaagatttacaatagcctgtacggctctcaagaagcctttgtcattgcatcttcaacaccaagtggtttgttacgtccacatttacctaactatatcttcgagttagttgaaccaaacaccgataaatatcttggtgagactggtgagggtgaactagttgtgacttgtttagttgatggtcttaaaccactcatccgttatcgcactggtgatattgtgtcaattaagagtgtagctaataaaccattttttgaaaaatatacaatagatgtggtgggacgtgtaagtgactctatcgaattaaatggaaaacattttaatgcagctcaaatagagtctagtcttataaagagcatacgtggttgtcttggttaccaaattttactcactcgttccaataataataaagattcaatagttgccaaattagagatacctaatttatctccacaagagcgacaattattaataataaaaaaaacaaaaaatattttagagtgcttaggttgtcagagtaccgtgatgattgtagaagatttgtctgaccatgttaaccttggtggttggattaaatggaaagctgcacgtttagtagatacacgtcagataaatggaaatttagagcctgaggttgaattaagtactgggcaattaatggaaagacttaactccttatgaatatagttgttcgaagtgtatatgacaacactcaagagttcgagataataaaaaagtggcgcgagaattatattggtataaatcccgctagcgaaaatgattttgaatattgggagtctattagggaggattgctcttattctttttatttttattatgaagagcaattggttgggggagttcgtttaacacctttagggcatggaataactatgggagaaagacaactagatctgttaagatttatctctgtaccgcttgaaactttagaggtcaacagacttgttattgaagagcgagcacgcggaaagaaaattatgtatgaatcattgcaatattgcttccattgggcctcacgcaatacaactcattctgaattaatagcgctgtgtttaccgcgtatggttcccctatatcgtcgagtgggagcaacaatgatacatgacaatctgcgaagtaaagaaatgccagaaaaagaatattcactaatcagcattaatctgaaggggttataatatgtcgaattttaaaaaacagcttgagaattcagtttctcgtgagtggcaacatattaagaatggcactttctggaaaaaaataatttctgaacctgttgatccaagactctaccaattgatgatggaacaaatataccattatacccgtcataattcagtgaaccaagcggctgcagcctatagtactgctccagaaaatcgcaggttgttacgtttcgtctataaacatgcattagaggagttagggcatgagcaaatggtagttcatgacctgaaaagcatgaatttgtataatgaaggatttgagagtcatcgtcctttacctgcaactcaagctctgatttcatatttatataaagttgcgctcgataaaggggcggtggctcggcttggatatagttattgggctgaaaattgttacggtcatattgatccgttacttagaaaattttctaatgacctcaacctaactaaaaataatatgagttttttcgttgcacattcagaaattgattctaaacactctgatgaagttaatgaagctatttcatttagtgaacttacaaaagacgaggaagaggaaattatcaacactgctgtgactacgctctatttgactggtcagatactcgaacaggtggctcatgaatatagtcttactagtgctaaacataaagaacctatcataatttgatttcagataatgtttaccgccacctggctaggtgagcggcatacaaactcctcaaggtacacaaaatgaaaatttgcatcctagtaggatctaatcgacgtaatggaattagtagacaagtctgtgggctaataaagcaatatatcaattgccgagcaatcgtttccttcatttttctggcagaaaaacgtatagagttatgcgatgctgataataattgttctaacaagaaatgctccctaaatgatgatatggaatatatcattaaacagatgattgaggcagatggcatcatttatatgccagtgatgcatgcgtacggtactaacagttgctttcaagcatttttggagcgatctggttatgggtattttcgtccaatgggaagaccattaaaggacaaggtagcgtcagtaattgttattggtcgtcgttacggacacactgcggtttactctcagatcgtccttaacatcatgcttaataaaatgatccttgctgggtcaggtttccccgtcctattcatgggtatgcttggtcaggcatcagaggatattgaagctcttgaagctcttgaagaaacgctcaatcgaatgatttcaatttcctatcggctcagagtaggattgttcatggaggctcctgcgtatgcttagtaactgaatctttggaatattattaatccttatgctgatttttttctctacaaattcttaagtctaattataaaaaattaacgtacaaaagcctttatttatagacttaaaataaattatcttaacaactcatgagcagcatcacgtatcgtcattaacttaccaatgttgtatcacctcaaaccgataagttagtagcttattttttttctaagaaaatcttttatattattatcctgaagattggctgctcctcttgttatctttgtaatgcttactcctagtttactggcaacttcacgttgtgagttgttagtgtttagaagctcattatagatacgaatacggtcaatgaggtcctccatttcgctcctagttagaatgcactccaaaatgagtttcatatcgtcagtagaatctgtcttacacaaaattttaatcagcatttcaaatgcttgttcacgtgacataatcgacaccttctgagataaaaatataaaaatctattttttaatagctttaaaaaaatagataaagctaagtattctaaagatattataatcatatcgtaaagttgttcctggcacgctcagggattcaatagccagaaaccatctggctcgaaagaaatgcgtggaaatgatcacatattttgttttcatctgtattttgcttgacagggtgttagattctgtactccatcgcaactagatgatctttggagagatagtatgtttcttttgagacaaggtcacttaacactctgcttgattgctgcattgcttgcttcattcctatcctttgcttcgacacaaccacaaatcgccccgttcacactgccgccactcccctacgctgtcagcgcgctggagccggcgattgacacgcagaccatgacattacatcacgacttccatcacaaggcctacgtagataacctcaatgctgcaatcaaggatataccgacactctctggaaaaacgctggagcaacttctggccatcgcatccacgttgccgccagcggtacgaaacaacgccggcggcgactggaaccacagcgagttctggaagatgatggctccggttggcaagggagggaaaccatcggcagcgctggaaacacaaattaaaaaggactttggttcactagacgctttcaaagagcgcttcaacaaagccgcaacaggtcgttttggctccggctgggcttggatgatattaaccagtagcggactgcagatcacatcaacacccaatcaggataacccattgatggatgtggcagaggtacgcggccagccattgctagccttagatgtttgggagcatgcgtactatctcaagtacaagtacaaacgtgctgattatctgaacgcttggtggacagtggtgaactggaacgaggtcaaccatttattcgaagtggcaaaaaaggagcaacataacctgaatcattaatccccagcattaacactgaacaacacagaatgattgctctatcctcaagcaaacgcggccagatcatagtatctggccgcgctggtgcctaacctgactttaagtaacatcttttccaccccggtttgcgctttcttcctcattacggagaggatccgaatcatcaccggtgatatgggaaaacaagaatagaaaatacgaaataactttaacttgtgttccctggaactgaatcgaatttcgtttattgattcgaaaaaaataatgcttatctagaataattataaatatccattccataaaataccggcttaatcagtgcccagccaaaatgaatggacaagcagcaatggagcgttctcatgtctaggtgctctaaaagtactgctgcttagcagtagcctcacgttgatgcatacacaatgtcaaaagcaagtcatatcgacttcttggaagaagcgcataatatgcgtgaaattcgcctaagggagatcgtagtgaaccacgccgttttatcttcgtgtctcgataaatgcggcgactgtttcgcctcagaagcagcgcgtataaagtttgacaatgacattgaggcgatcttcgaactcaaacgcaaacgaaacgctgtcattcttgcgcataattaccaaactccagagatctttcatggtgttgccgacattgtgggtgacagtctcgcattagcccgcaaagcaattgatgtcgatgccgatgtgatcgtccttgccggagtgcatttcatggcagagaccgcaaaactgctgaatccagaaaaaaccgtactgatccccgatatggaggcaggctgctctttagcggagtcgattacaccggaagacgtggccttattacgtcagacgtatcctgggattcctattgtcacctatgtgaatacttcagcagccgtaaaagcggcttcagatatctgctgcacctcaggcaatgccaagaaggtggtggaagcacttggtgttcccaaagttctgatgattccagacgaatatttagcgcgcaatgttgccaaagaaacggaagtccagatcatttcatggcatggtcattgcgaagtccatgaacttttctcagccagcgatatcttgcagcttcgcgaaaatcatccaggtgtcaccgtactcgcccatcccgaatgtccgccggatgtggtggcagcagcagattttgcaggctcgacagcagcgatgtccgactatgtcactactaagcagcccaagcgagtcgtacttctcacagaatgctcaatgagcgataacatcgccgtccatcatccagatgttgagttcatcagctcctgcaatctttgcccgcacatgaaacggatcacgcttgccaatatccgaaccgccttggaagaaaaccgtcacgaagtcacggtagatgcaaaaattgcagcccccgcacgacgcgccgttgaaaggatgttggcgatatgaccaacgagcaagatggctgagatagtggactgttttgcagaccgccccatcatcgttggtagcgggcttgctggtctgatcgcagcactgaccatgtctcctgaaccctcagtgcttgtcacgcgcagcgccttgggcgcagaaacatcaagcgcatgggctcagggaggaatgtcggtcagccttagccccgatgacaatcccagcctgcatcttgccgacaccttggcggctggcgatggtctgtgtgatgcagtcgctgcagagagcatcatcttggaagcgcttgacgcttttcatgtcctacaacactttggcatccacttcgaccaagatagcaacggccatctggcgcttggactggaagcagcccattcccgtcgccgtatcgtgcatgttggtggcgatagatcgggtacagcgattgtacaagcattgactgcctgtgttctcaacgatccctcaatcacggtgcttgagggcctcgaagcacgacacattctgatggcggataacgtggtctgtggcttgctgcttgccaacccgacatccgagattgtgttgccctcctcaagaattcttctggcaacaggcggcattggtgggctttatgacgcgaccaccaacccggtgagcaactttggtcaaggcatcgcgatggctgcacgtgctggggccgtactggctgatatggaattcgtacagttccatccgacggccctccattgccacaaccgcccgctggcgctcgtcagtgaagctgtccgtggtgaaggtgcagtcctcattaacgaacgtggcgaacgctttatggcggatattcctggtgccgaacttgcagctcgtaacatcgttgcacaggcaatcagcgccgaaataacccgcggcggccaagtatttctcgatgctaggcaagcattgggagcacgcttcagcacccgctttccaaccatcaccgcactctgccacaaagtaggtattgaccctgtacacatgccgattccagtctgtcccgctgctcattaccacatgggtggtatcgcaatcgatcaccaaggccgcagcagcattcctggcttatgggttgcgggtgaagcagcgtctacaggcttacatggagcaaatcggcttgcgagcaattcactgcttgaagccgtcgtcatggggacacgtgcagcccgagatatcacattccacaacacacctcaccctctcggaacaatccctatcacccctaaaaagcctgataccacactgatccgaccgattgtctctcagtgccttggcgtacttcgccatgccgcagatatgcatcgtgctattgctgccctcttgccttttgtggaaggcgaagaagagtcttccgatcctgccatcgttgcgttgctgatcgccatctttgcatatcttcgcaccgaatcacgcggtgcccatgcacgcaccgatttccctctcaaacatgacacaacacagcggcgccacatgacacttgaggatgttcttgaaatcgcccactcctgtgttgcacaacgcaaagaaaagatctcctgacatgaacctcatttctcttccacgtatcatcattgaaccgatggtacgccatgcgcttgcagaagatttaggacttgcaggcgacattacctcagctgcagttatccctgaaaaacatcgttccacagtgatcatcgtggcgcgtcagtcgggagtgatcgcgggcttggatacagccgagctggcattcaaagtcatcaatgccgaacttgtcatgatgcggcatgtgcacgatggcatgaaagtaaaaccaggcgatgtgattgctaccatcaccggttgctcacgggcattgctcactgccgaacgtacagcactcaattttctgagccatctctcagggattgcaacagcgactgcatcgatcgttacagccattgcaggaacaaaaacagtcgttgtctgcacacgtaaaacgctcccgggaatacgtaccttacaaaaatatgcagtccgggccggtggtggcatgaaccatcgatttgctctgtacgatgcgatgttgatcaaagacaaccatatcgcaattgcaggaagtgtccgcgaagcactgcgccatgcaaaagccatggccggtcatctggtgaacattgagattgaggtcgatactcttgaacagctacatgaagcgatggaaataggagtagacgcggtcttacttgacaatatgcagccctccgaattgcgagaggcggtgaacattgttgcagggcgagcgatcaccgaagcatctggacgtattactccagagacagcgatcaacattgccgcttctggtgtcgatctgatctctgtcggctggatcactcatagcgctcccatccttgatatcggcctagattttaagagtgctgcatcatcagatcgataaaatcgaggtcgaaatcctgttggattctgatattaactagtacggtgccgtaggcattgccaccgacaacacatatccctgcccttccctcttgatgcaacatgattgctttgccatccgatgaaggcaacattgatacgaacccatcggtcatcttcgtgtcgtctcagaaaacggaaaataaagcacgctaacggcgacggctctggctcaatacgagctaagtctgcctgcatagcatctccccatcgccatcgccgcaaccggcgtggtcgcctacgccaccaatagcggcatggaaaacgaccccttggcgatcaacaaggccaagattgtgatcactcaggccgtcatcgttgccgaacagcacgccaacggcaaggcatcacgcgccgagtacgagaactcggagcagagctgggtctatgacgtggaaatggaatcactcaaccaaattctttttctctcgctcaacgcccctgagcatcccggcgccctgacattgatggtgcccatttcccttgccgagtggttcatttggacggtgccactcctgatcggcatcggctggctgcgcggcagcgagaacacctgcaagacgatgcttgtcgcaaccgcatcgggattgctcggcctattcctcattcccaagcgattacctgacactgcgctgcaaagaggtccgcgaatcgcaggcatcgggttggccttgttaggtattcccattgcttgggacgcatctacctgggggttcacttctcgctcgatcaacgtagttggcacccagatcactgacctgctgaccgatggcttaggcgtcagcttgtacatcagcacctcggtattcgctgtagcgctcgctgcgatcttcttcgtctggtatcgggtcgaacgcactctgtccatctatgacatcgtgacgcgcagccgagagctgttctattgggctgccatcctatgcacgttcgccctggacaccaccgctgccgtgaggcattgggtctgggcttcattgggggtgagcttgctttcgccgcgctgatcggtatcacctatgtagcctggcgcatggacggcaacgccgtgctgaccttttggatcggctacatatcctgacccgcccattcggcgctgcgctcggtgacttgctgacacaggccaagacctatggtggccttgggcatgggtgccatgtggaccagcgccttgttcctctcagtgatcatgatgctggtggttgttgcacaaatcagtatcaatcgaagccgctctgcccaagctaccgagtaaccatctttaataacctcaagcaaaaatcatgttccaacaacacccaatcgctcgtcctgtggctgtggtgtcggccgccgtccttctggccggcggtcagttgctcgaagcgtgccgatcagaacaacgcaagcgcagtatctgccgcaaaagccacctccaaactgggcgatctgtcagcgttccacagcatcgctgttgatgtcgccgccatcgtggacaaaaacgacttgcccgctgctaaagcacgcatcaaggatttggaggtcgcatgggagttagccgaagcaggactgaaacaacgcgccgccgatgactggcatgtgttcgacaaagccaccgacaaatcgcttgcagtgctccgtgccgacacgccaaaccagaccgactgcaaggcagcgggccgacctgctgaaaaccttcgacacgctcgaaggaaagtgagcgtgccccatgaaaccatccactgaacacgtgctggccaaggtgcccgaagtcacgttgggtttctggctcatcaagatcgccgccacgacgctcggtgaaaccggtggcgatgccgtctcgatgtccatgaacctgggctatctggtcggcactggcatcttcgcggtgatcttcttggccaccgtgatcgcacagatcaaagccaaaggtttctatcccgtcctgtactggacgaccatcatcgccaccaccacgcggttagcacgacgctcaccgatttttcggatcgttcgctcgggatcggatacgttggcggttcgagcttgctgctggccctgctgctcggctcgctcttcatctggcatcgcacccttggctctgtgtcggtaagcaccgtcagttcgcccaaggcggaagccttctactggctgacgcggccgtcgtgttcggtgggctgctcaccggcctactactggacacgtgtgtcctgcacgctgctcttctgggcggcgttcattatgacgcgcccgataggtgccgtggttggtgactttctggacaagccgctgagcgcggatggtccggcactgagccgctattgggcatcggccgcgctgcgaattctcgctgctacaaaagccttgctggtgcgacctgggatcattctctcgcgcagcgagctggaggatcacatctacgggtgggggaaagaggttgaaagcaatgccgtcgaacttctgatccatgccctgcagcccaagctcggcagcgaggtcatcaaaaacgtcaggggagcggatggatggtctcaaaaggcgtttgaacgaatcggttcagctcaaactgttcttcaccctgttgctggccatcctcgtggtcgccattgtggcgggcatcttttcgttcctgtcggccttcgatgagacccacgagctacaggatgctgtactgcgccaggtggcgtagctcatggatcgtcagcgtctgtcgccgtctaccgatacgcaactcaagcaggcgtagatgcaggcggcacactttccctgccgacgacactgcatacgctggaggttggcggcgagaccttccgcgtgctggtcaagacacctgtcggcgtttgttgcctatacgggaaaatggactaaccctttggagctgtcacccaagacatgggttttccttggactgtccggtttggtgacaggcgcatcgtgggtgtgctacttgtgtgcgctcaagatcggcaatgcatccaagggcgtgtcagtagacaaactcagtctcgtcctggtggcggtattcgcgttcacattttttgggccaacgtccgacgttccgggagtggtccggtattgcgatggtggctggtggtgttctgttactcgcgttcatttgtgcgcgatggtgacacggttgtgatgcatcgcatggatgggttagttggcccgcaatctggatgacctgcgctgcctggtgcaaaaactgaccaagtgccgagtgcgcattgagttcgtcaaggaaagtttgacctgcaccgatgaagactcgtcgatagcaaatctcatgctgtcggtgataggcgcgtttgccgaattcgagcgtgccttgattcgagagcggcaacgtgaaggcattatcaatactcgagagttggatagctatgccttgtcattccatcttgtgcgccgcctagcgggaaaagctgcagacgttgccggacaccaaggacgacctgatccggcattacacattcagcgctaccgacttatccatcatccggtaacgatgctacccagtcatctgctacctgtactttcccggcgtcatccttggggtcgatgagccaccgtttctgcctttgttgaaactggtcgccaaccatctcaaggtcgggatggaagactgggatgagtacggacagcgggagcagacccggtgcgagctgcaaactatgttcggcttccagccgttcacgaggagccactaccgacaggccgtccagttgctgaccgagctggccaggcagaccgacaaggacatcgtgctgaccagcaccttgatcgaacacttgcggcggcagttgagcgggtaaacgccgaggcgagcactgaagccttggccgaaccgctggcggacgtgccatcgccaacgcctcgacgatctactcaaacgccctgacaacggcaagatgaccaggctgcgccagtcactgccaagccgaattcgcggcacatgctggaacacatcgaacgcctcaaggcgtggcagacactcgacctgccgactggcattgagcagccgccaacgccaaggtgcgtctgtgcggccgcattgaccaggcgctgatcgaggtcaagcaagcaggccgtgatccgtttgccgcgatcaaggcccgtcatgtcttgggatgcctttgccgagagcgtcaccgaggcgcagcggctcgcgcaaccggaagacttcgattttctgcaccgcatcggcgagtgcgaggctacacgccggaattcctcgacgtgctcagctgtgggctgtgcctgccgccaaggatgtgctcgacgccatcgaagtgctgcgcggtatgaacagcgacaacgcgcgcaagatgtccaccgatgggttgaccgggtttatcaagccgcactggccgaagctggtgataaccgacaccggcttcgaccgagattactacgagctgtgcgcgctgtcgcaactgaagaattcgctgcgctccggcgacatctgggtgcaaggctcgcgccagttcaaggacttcgaggactaccctgtgccgcccgcgacattcgccagcctcaagcaggccagcgaattgccgctggccgtggccacactcgtcacttcgcgcatctgaaatccggcgaccagaccaaggacaagaccctgctgctgagcacgatcctggccgacgcgatcaacctaagccagaccaaatccaagcttggcacatttgcgacgaaacctatggggcggtcctggccgatctggtcaacgcgtaattctggcatccattcgccgagcactggggcgacggcagcccgtcatcatcggacggccagaacttccgcactggtagcaaagccgagagcatgggccacagcaacctgaaatacggcagcagcccagggcggatgttttcttccgatacccgcgtcagaacagcctggccgtggtcctgcacgagctggggcgcattgagcgcacgctgttcatcctgaactggctgcaaaacgtggagctgctgcaaccggcgaagcaaccgccgatgtattcattgaacggcccctcttgaataaagatttgtaacgatttctatcttctctattgttggtgacccccaaaaccacgcaatgtagtgacttggtccgatgctcgcagtgcatcgcgtggtttgcctctgattgaagggagcgcgatgtgtggcaggcttgccacaaggaagcattttgaaagggtgtaggggaaatggaggctgttgcgcaatcaccggtatccaatctgtggtgtaggtggcttgttgcaacgttgtttggcacgatgcatatccatgatgaggatgggcaatccatagaccaatcatgattgcggtatcgggcagataccagacaagttagttttgcgtgtcggtcatgggaattgagggatcagtaaggattactgcgccgagggttgtacgtaggccaagtagactaagaattaccggggatgtgggctgtttttatatgaaatcaattttttaatatgaaaatgcgtattgcaagttggaacgttaattcactcaatgtgcgtttgtctcagttgcagcagtggttggtggaggctgcgcctgatgtgcttggccttcaggaaacgaagttggaggaccatcagtttccagaagcagcgttggcggcattgggctatgtcagtgtgtatgcggggcagaagacgtataacggtgtcgcacttctggcgcgcgtggcgttggaggatgtgcaagtcggtatcccggggttcgaggatgtgcagcgacgggtgatcgctgcaactgtggatgggatacgcgttgtcaatctatacgtggttaatggtcaagaggttgggacagagaagtacgcttacaaattaagctggttagatgcggtgtaccactggctggccgaggagctgcaacgctatccccgccttgtggtgctgggtgatttcaatattgctcctgatgcccgggacgtctacgatccgcaggtatggaatgaggatcatattctcacttcgaccacggaacgtgtggcactgggtaagctgttaggactggggttgcatgatggttttcgcttgcatcaccaggatacggggatattcagttggtgggattaccggcaagccagtttccggcgtaataggggcttacgtattgatctcacgcttgtctcggaggcgttgcgcgcgcaggtggtggcttctggaatcgactgcgtgcctagaggctgggaacgacccagtgatcatgctccagcgtggattgaattagctttggcggtgtcttcatcaccttaggcatttaagcgtgttatgtgtgatgttctcagccagggccttgggggatgtttgcggagacaggtggtgttgctgataagtatgcaagactgcccgctgatgaatcccacgatgcctgtctcgattgttgagttactgcccgaaatcgctgggcactcctatatgggtgtaacgtcaatgggaggtgtgctatctcacggaataacgaccacgttttgatgtcatgcaagtgcggtaagtacggtgtgtgagcgtcactggcaatggggcaatgtgcggttgtggctgcgcgggcgggcgcgtggtgagcggggggagccgcaggcacggcttgtcttcagcaaggcattagggtgggatccagaggcactgcctttaggccgtgatgtgcgtggccgtcctcggtttgctgggtctttgtcattctgggatatcagttggagtcatagcggcgactatttgctattgggcttggggcatgggggatgtctgggcgtggatttggagcgtgagcgctttcggccacatttgctcgatctggcgcagcgttttttccatccgaacgaaacggcggtattgcgtacattggatgagccagcacggcaggcgttgttcttccgcttgtggtgtgccaaagaagccattctgaaggctcacggtgctggtattgcgtttggtttgcaccgcttacatttggctgaggatgagggacatctgatgttggtggagtgtgatgcggcgttgggtacagccatggcgtggaggatagatgagtggcaggctgcaccgggctatcgtgcggctttggcttggcgtccatttgccacaattgagtagattgcccaggtggaacagcgctgcactaggcatttagaacagtatccgcttgttgcaggtgcgggataacatgcgatcgcgagaagccagctgtatttcaggagatgggagcggcaaggtgcggcactgtcatccatagcttcctcaatgatctctttccgtgtgctcgatataggatctcaatgtttttactggggcatgttctacaacgaagccaatttaccgatgaatgattcttctctttccccagaagtgaccgcagacctggaatatggtctggatatcttggaactggaccgtgtctatgttgttccgctgttggcctatttgacactgctcatacgctggaaccgtacctacaatttaactgcgatccgtgatccacgggagatggtagtccgtcacttgctcgattcgttggcgatacagcgttatgtgactgtcggccgccttgctgaccttggctctggtccgggattgcctgggattccgctagcgattagttgcccgtctctacaggtgacattggtggaaagcaatggcaagaaggcgcgctttctacgggaggtggtgcgtcaacttggtttgagtaatgtgggtgtgtctgaggtgcgtgccgaggcgttggacgaagctctcacgtatgagcatctcactgcacgtgccttggatacgttaaacggcattgttacggttggcgggcatctgctcaaatctgaggggacgttgttggcgatgaagggtgcctatcctcatgaggagatcgccatgttgccgccccattgggttgtcgaagcagtacacccactgcaggtccccaagctcaccggaaagcggcatttggtgatagtacggaagagatagtgttgtctcagctcttccacatgatgtgtgcctgtgttgcggcatatgcctaaagtgcctttgcgacttcgacaacgtgttctgcagtgatattaaaatgtttgtacaagacatccgctggggctgatgcaccaaaggtatccaggccaatcacggcaccatgtaaccctacgtattgccaccaaaaaccagtgacgccagcttctattgcaacacgcttgtggactttcgatgggaggaccgactcacggtaggtggggtcctgacgttcaaacacattggtcgagggcatcgagaccacgcgtgtttttagctgcatcgcatcaagtgtctttttcgcttcgatcgctaggctgacttccgagccggtcgcgatcaagatgatgtcggggatgctgctcgccgcgtcgaccaagatatagccaccacgtgcaatctgctcaagttgtgcatcatggcgcggttggtgcggcaagttttggcggctgaacaccaaacagctcgggccgttcttgcgagtgatcgccgccttccatgccactgcagattcaactgcgtcacagggacgccacacgtcattgttggggatgtagcgcagtgcggccaagtgttcaacaggctgatgcgttggaccgtcttcgccaagtccaattgaatcatgtgtgtaaacgtgaatcacatgggctgggatcaatgcactcatacgcactgcgttgcgggcgtaatcactgaagactagaaatgtcgcatcgaaggggataaagccgccatgcaatgcaagtccatttgcgatagcactcatcccaaactcacgtacgccgtaataggcatagttggcgttgggggcatcgccaacaactgtttggctccctttccacaacgttagattggaatgtgccaagtcagccgagccgccaattaactcgggaaggaaaggtgcaaatgcttcaatcgccatctgcgatgctttacgggaagcaatggagggccccgcagcgtgaactttggcaatgtaagcatccaattggctgagaaaatcagtaggtaactcagcgtgggagcgccgggttaattcagctgcttccttaggatactgtcgggcatagttgtcgaacccctgctcccactcggcttgacgtagcatgcctgtgccgttagcacgccaaccatcgtaaatctcggacggaatctcgaacgggccgtatggccaatccaacatcttacgcgtggcctccagttcctccgctcctaatggggcaccatgcgaggattctttacctgctttattgggtgagccaaatccgatcacggtacggcagcatagcaatgagggcttgttctcttgagcaacggcggcttggattgcggttgcgattttttccgcatcatggccatcaatatcgcggattacatgccaaccataggcttcgaatcgtgctggagtgtcttcggtaaaccaacccgcagtattgccatcaatagaaatgttgttgtcatcccagaaacaaatcaatttgcctaagttccaggtacccgccagcgcggctgcttcatgtgagataccttccatgaggcagccgtcacccatgaacacccaggtgcggtgatcgacaatcagatgttctggacggttgtagcgttgcgctagaagtttctcggccaaggcaaaacccactgcgttagcaaacccctgaccaagtggccccgtggtcgtctcaatccctggggtctcgctgcgctcaggatgaccagctgttttgctatgcagctgacggaatcgcttgagttcatccaacggcaggtcatagccacttaaatgcagcaatgcatattgcaacatcgagccgtgaccgttggaaagaacgaagcggtcgcggttaaaccagttcgggttgttagggttatggcgtaggaaatcgttccaaagaacttcagcgatatcagccatgcccatcggcatgcccgggtgcccagaatgagcagcctgtactgcatcagcggcaaggaaacggattgcgttggccaactggcggcgtgtgggcttggtcatgatgcatcgacggtagagaaaggggcatcgtgaaagtcatacgatgcccctctattgtcccacagtgacacgatctcagatcaaggcccactgactccataagccactaaacacttccttttggctgaggctcgcctctgcacaccaatgtagtcaatgctagatcgccagtcacatttaatgcagtgcggcacatgtccaggaagtggttcacccccaaaatcagcccaataccgacaggatcaatcccgaccatggcacagatgagtgccaccactggaagcgagccggacggtacaccagcggtgccgatgccacccaggatgcatactgccatgaccatcgcttgctgactaaaactgaggtccacaccgaaaaattgcgccaggaaaatgacggtcaaaccttcaaacaatgccgtgccattttgattggcagttgcaccaatggtcagtacgaaacgcgaaatttgcttcggtagcttcatctcgtcagcaacacgcagcgcggttggtaaagtggcattgctagaggctgtagagaacgccatcaaggttgcctcttgagtttcgcggaaaaaacgcagcggtgaacgtcccgcccaccatactgctaaaccataggtaacaaacatatgcagcgacaaccccaggaccacaacaccgacataagccgccaaccgtatcaacaactctaggccgaataatgacgtcaagttgaacataaagcaggccactgcatagggtgcaagacggatcaccagtccaatcaagaccatcgaaacttcaaatacaccctcaatagcacgcttcagtgtctctaccttctcctgcggcaccagaaccataccaatgccaaacatgatcgtgaagaacatcagcgataaaatggcatcgttgctggaagccgctgcgaccacgttgctcggtacgattgataacagcatatccatgccgtggatctgggtatctgtggaagcgacgatctggcggctacgctccgcattttcactaagcagctgctgcgccaactgcggatcgacccccacccctggcttgagtacgttgacaagcaccagccctactaacacagccacggatgacagcacaacggtataacccagggtgcgccaaccgatgcggcccagtgcgcggatgtcgcccatttcggccacaccgaccacgagtgccgagaacatcaagggcacaatcagcatgaagatcagattgaggaataacttggaaaacggcgtggtgagataatgagtggcatgttgcacccaaacgacatcagcaccaacccaatagtgcgcagccaagccgattagcaaaccaccaagaaaacctatgctcatcttccagtgcattggcaggccggaatgagaagcagcagcagacgaagtcatcaattcgagcctctcaggcaaagatgaaagccaagagagtagcaaacattatcgctaaaccacacacgcaatcacaccgatacaacaacggcaggattaggaataattctgtcggtacaggccatgattaatcgaacgtgtatcccatggaatgcttcgcatatacaactaccagaaaattgaagtgtccccaggacggtaaaaatgtctgctaaaggtttgaaagaatcactcattaaaggcccctggttgcttgcatcgcatgcagtgtacttggacatccacaagcaagatgatgtgagctgcatcatcctaaagaactagaggaagctaccgcatgtgtgcgtggtaaaaagcaatgctggctgtgccaagagtatccatttgctctcttcctgggcttcagcatccaaaatgagtttgcactatgaagtcgcgctaatctttgggtcttttttgggttttttatgatcgctatgttgcagataaagcaaattctttccagatgctgatcaaagtcccttgtgccactgctgaagtttctatattcatgattccgctgaatgtttacatcgaattcaaaaaatgcggcataccaaaagtagcgattgctggctcttttcacttcaccattgaaattcgagcactggcaggccgcatgtacctgagcctgccgatatggaactctctatcgccactcaaacctgcaagcgaatcgggcaggtcactccagtacctcccaatccgcaatagccgttaggatgttttgcaagatattgttggtgctcattctcagcatagtagaaaggcggtgccggatggagtatctctgtcgtaattgcagtgtaaccagcagtatttagttgttgctggtaaacctctcggctggttgatgctgcagcatattgcttagatgtagtgcaatgaatcacagaacggtactgggtaccgatatcattgccctggcgcatcccttgggtgggatcatgggattcccaaaatgtctgcaacaactgctcaaatgaaataacagtgtggtcatacactaccaagacaacctctgcatgacccgtctccccagaacagacttcacgataagtcggatatggcaccccgccgccggcgtaacctgctgctgtactgaatactccaggcaattgccaaaacagacgctcagcaccccaaaaacagcctaatccaaattgaatctgcgccaaacccgtgaaggcatcgcatagtggatggcccttgacgtaatggcgattatccaatggcaatggttcactacgtcccacccgagattcatcaaggcgccatagatgcttgagggcttcgattgtcagtaccatgatgtaacctttgatcgaatatgttcatgctgtgcagcaatgtgcagacaggcttgcaaacccggttacataccaagctcaacacgaaacggtacagataccgaccattaggggcatttgccctctggcatcgctgagctgtggtgattaacgatcagccacgttccatcaatcttactgtaagtgaagctgtagcgtgcttgcacgttatgtttgctgccatccttgttggtcaaaatgaaggtatagacgccagcatccaatgcattgttcttgtccaggagagtcactttacggtagttaatgtatccctgaggcttcaatgctaaaaagtgactaaagtagtcaagaatttcagatcgactgctacggacctggttagacatggttggcaacagcacagcatctggtgcgtacaactcagcaacattatttggatttcctgtggttaaggcagcattccaatgatcaaacagttgagcaacctcacgttcctcaacgttggaaatcaatggcgcacttcctttgtagcactttacgttgcctgcaaaaaccgggaaggcaaagaatgaaagtgatagagagagtaagatacgatacacgggagatcactctgacattatttatcgtgattagcttagctaaaagatttaacgtttgccagagcaccaaattacgattaaatccaacaacactagtactcctatttagttaggatatgcatattagaggttgtatacatgcagaaaaaaatttcaataccgctgcacattagcaatcgctttgtaggaaacaagcaccaggtcgaaactaacgtataaggtatcagtacatctcccctgcccactcaagatgaacttcgtataggtcgatgagcacccactaaatattaaatactatgggcatgtttcccctcagcatcggcacgctgatggcacaccacttggcaacctggagtgcagtagcctaaagatgagtcgtgttacgactgggtataatgcgatgtcgtaaatcaaacatcacatgtttcctgtaatgtgtttttttcaagtaagcttgatggcggcaatgctgctgagttatgtccaatggatggtattgatggtgctattcttgtacgtgtacgtgcgtggtttccagcaattgtgccgctggatttgttatcgtctttactacgcacctattggctcccatctacagttaccctacattattgcgcttgccgatctacggtgtcggcaagacccaaccaccacttgatttatggaacaggacaccatggcaaaaatcgccaagaacgcgaaggctgctccgaagaaagcagtgaaaaaacaaaccgccaagccgggcaccatcaaaccgatcaaagaaacactgagtaaatctgctttggtagctcacttggctgaatctagtgcattggcagccaaggatgtacgcactttactgggcgctctggagaataccattcatgcctcattgcataagaagggggttggtagtttcacgctaccaggtttgttgaagatcagtacggtcaatgtgcctgccaagccaaagcgcaagggaatcaatccttttaccaaagaagagcaatggtttgctgccaagccagcttcggtaaagatcaagacccgcccattaaaaaagcttaaagacgcgacactttgatgacttacgcagtaaagcgattgggacggtcttggccatctcaatcgcttttgagatcaccgtatcctctgcaagcgctgtttttttgcatatgaattttattctagtaacgactgctcgccgttaaacttggtgtagagaagaaacaatcgcacaaaaaaatacctgagaaggtttgtatgagttcatgaaataaaaaaataataatgattataaaattataaaatcttattgcttttatatgctattcgacgaaaaataaaaaatcacttttggaaacaatggctccattacaaagtaattcaaaaaattaattcagctaaaaattccattcagtggtggaacttaaaggtagtagttatatcagttgcacacggttcacatataggtttaccgatggtattgaaacgaagtatggtaagtccaatagatcatgacctattattgcattatgtgcgattttttgaatgggctttcagcaatgagttcactagttgcagcaaatgctatttcaggcatgataagtcagtcccggcatcaatcatgctgctctggcaccttaagctaggttacttcaatggcacatgacgctgatacaaacacctggttaaaatttccagctgattcctttacctaattattcttggagttttacgtgatctcgcgtaccgccattttggctgctgccattagtttatctcttgctgggtgttcttccaaagaatcttccgcaattcctgagaaaactacaaccacacctcaagtgccagttactaccagcaatccactgttaacggccagttccttaccgttccaagcgccaccgttcgataaaatcaaggacagcgattatttgcccgcgttcgaggagggaatgaagcaacatctggctgaaatcaccaagattgctgagaaccccgatgcaccaaccttcgaaaacactatcgaaatgctggagcacagcggcacaaccttggatagggtctcacgagtctttttcggtctagtacatgctgacaccaatgatacgcgccaaaagattcaggaagaaattgcgcctaagctggctgcacaccaggatgagatttatttgaatcccaagctgttcactcggatcaagtcaatttacgatcagcgtgacacgcttagtttggacccattacagaaacgtttggtcgaacgtgattatgaagggttcgtacatgccggcgcacagttgcctgaagcagataaaacaactttacgtaaaatcaacgtagaagagagcacgctgtccacacagtttcacgctaagctggtcgccgccacagcggcaagtgccattgtggttgatgaaaaaaataaacttgatggactgagcgagggcgacattgctgcagcagcggaggctgccaaggcgcgtaagctcaatgacaagtacgtactcgcattacaaaatacgactcaacaacctatatcagcttcgctgaaggatcgtgagttgcgtgctcaggtgttacaagcgtcagaaactagggccgaaaaaggcgacgctaacgatactcgccaaatcgtgcagcgcctgactcagttacgtgcacaaaaagccaagttactcggtttctcgaactatgctgcttataacttggcagatcagatggcaaagacccctgaagcagcgctaaaactactcaacgataccgtgcctgcggctactgcgaaagcacgtaaagaggctgccgaaattcaaaagttgattgataagcaacgtgtcaatacgaaagcgaatcactttgagttagttgcctctgactgggacttctatgcggagcaggtgcgcaaagccaagtacaatttggatgaagagcaaatcaaaccatattttgagctcgacaacgtgctgcaaaacggtgtgttctacgccgccaatcagctatacgggatcacttttaaggagcgcaaagatataccaacttaccatccggacatgaaggtttacgaggtgtttgaccatgacgggagctcgttggcactgttctacactgattacttcaaacgtgacagtaaatccggtggtgcgtggatggatgtgttcgttgaacaaaatgcgatcaccgggaccaaacccgtggtctacaacgtctgcaactttactaagcctgcgcctggccagccggcactattgagcttcaaagacgtgaccaccctcttccacgagtttggccatgcgttacacgggatattttcgaaagtgaagtatccttcgttggcaggcacctcaacatcacgcgattttgttgaattcccgtcgcaattcaacgaacactgggcctctgatccaaaggtgttttcacattatgccaagcactaccaaaccggtgagtccatgccgcagagtttggtggacagtattcgcaaggcaaaaactttcaaccagggttacgtaactaccgagtacctttcagccgcacttctagacttggcttggcataccttaccagccgatgcgccactagaggatgtggagaaattcgaaaccgatgcactgaagaagtacaaggtcaatctgaaagaagtgccgccacgctatcgcactagctattttgaccatatttggagtggcggctattcggcaagctattacgcttacttctggtctgaagtgctgagtgatgacgcattcgagtggtttaagcagcacggtggcctagaccgtaagaatggcgatatattccgcgacaaaattctctcgcgtggcaacagcattgagttgggcgatttatatcggcaattccgtggccagaatccgagtgtgcaaccactgttagataaccgtgggttaaaataaataagctacgtgctcggcaggacgagatggtatccatctcgtcctgatttctaaatatgatcggacagcaaaatttctaacttcaatttaagtagaaattcacaccactattaattgagcaattataagaaaatttagatttctgaacgaaggtcggaacgtcatataggtacgcttcaaagtggacattgccattcttatacaccgagtatcgcatgacttgctgaatcggtttgccagtagtttgttcaacaactaacctagcttcggcgaatgacaatacatcattggtgagccgatatccttcaataggtgaaccaccacgcgtgctactaggaggcgtaccaacctccggagtacagttggataggtcgattgaaaatgaaacaggaaagccattatcaagcactttaatgatttctgattgcttattaagtggtaatggaaatggcagcgcgatagccgagcttacaggtagcaacgataacaataatgggcagaaaaaagtaatgcgtttcatcaggacatttccttaaagtttagttaggtggtgacataaaagcggttcaccgaaatttaagaatatataaactcaatgatattcccatgtgaatctttaattaatatttttattgcgtgcaataaatcacattccttctgagataaacataaaaattattaaatgaaggaaaaatgaaatagtaatttaaaattcaaaaaattaaggggatcgaggggctgaagcatattatcaaggagactttttaataattttcatgatatttcctagttaaagatgatcaaaataaaaatccattttttagtaaattctaattaaaattatagatttattgcatcttattgaagttttgaatgaaatagcacactagtggcaacctctacaatcatcctcaactagaacaaaaaagtacgttatttaagtctcttcttaaaggatcatagggccatcagattaataaatatccactcagataataaccttttacctcatgtatttttcaatgaataataaatcttatttttgatatttattgagctattagtgcacagtaaattcttagtctttctacggaactggaatatccacttattaaaaaaggaaatcgtgattcgtgacgcataaaaaaacgggccaaaaaataatttccattaaagaattctaccttttactaataaggtatataataatcagctgcgtttgtcttacctgtggctgttagtcaccatgactgcacaaaaaactctttccgaatggcttgcatatatccaacaacaacacccgcagtcaatctctatgggcttggagcgcgtgagcgctgtggccaagtcaatgggattgggccatccggcgcggcactgcattgtggtcggagggactaatggcaaagggtcgaccgtaacgttcattgagtcgatagcgcgcgcggcaggttggaaagtcggcacctacacctcaccccacctaatgcgctacaacgagcgagtacgcattgatggcagagaggttgatgatgcgctcttggtcgaagctttctccagggttgaagtagcacgcagagaaactgaactgactttttttgagtttggcactttggctgctttgtggttattttcgcgcgtcgtgctcgacttggcgatactggaagtgggactaggtgggcgcctggatgcagtcaatttagttgatggcgacgtggctgtgattaccactgtggacattgaccataccgaaaggctaggtggcgatcgcgaggcgattggtaaagagaaagctggcattattcgaagttggaagccagtggtgctgggtgagcttgacccgccatcaagcgttctgcgccatgcctacttacttggtgccaatgcgatccgcgctggtagcgattttttctacgaacaaatcaatgaaaagcactggcgctggcgggatgtttcactatgcatggagttacccttgcctacactcagtgcaccaatacagctagccaatgcagcctccgcaattgctgcgctgcgtgcgttgccacgaactctaccacttgaagcctggagcgacggcgtagcaagagcaacgattgctggacggttacaagcattccagataggagctattcaaatcttgcttgacgtcggtcacaacccgcaagctgcacaggtactcgcttctgcgctgcgtactcaaccgatacaaggtaacgttacccatgcagtctatgctgcgctggtcgacaaggatgtgctaggagtcgctactgctctggctgagatagtgacacattggcacttggctgggctggattgcttacgtgggcaatcggctgaatgtttggctcgacgacttgcagaaatatcagtggtaccttccagcctttccggaagcgttaccgaagcattacagcaaacgttacaaactgcggcaccaggtgaccgggtacttgtattcggctcgttccataccgtagctgaggctttgctactgcttggttcatttgacaagagtgaagcattgccagtaaacgtataattgataacgctttaattttagtgtggtgctttccaacagtggacattgctttgaaacagcgactgatcggtgccgtcattctagtggcgctcgccgtaatattcttaccgttgctggtcagggggcccgcacctgatagtggtgtggccgatgtgcccctaaaagcgccacctgcccccaacgacgccaagttcgaaactcgtgaattgcctttaccctcacctactactacaagcaataccacgcaaataggtaatgcaccactgcaaccgcccccaaacgtagtaaaagaaagctcagatgtccttgacgcaaaaagaacattgccacctgacatagcagccggtaactatgcggttaactttggggcctactccagccctattgatgctaataaggtgattgtgcgacttaaacaggctcaattaccgggattcagtgaaaagactcaggtcaacggtgccgctgcttggctcgtacgtattggcccatacgctgaccaagcacaggccgaagcagtgcgtctggaggcaatcaagatacgaagcgacgttaacgcacgtgtggttgttttagacgcaaaggcggaaagtcccgtcgctaagcctcgggtgtcaagcacaccttcacatgtaccggtacaaactcaaacttctaaactaccggtgaaacacactcaacctcctactactggcgctaccgcagctgctgctaaatcgtcctcctcacctaccaagacacctgtaacattccccatagcacctaagactagtatcggtttcgccgtgcaattaggtgcatttgttcggctcgaagacgctaatgccttgtgtgatcgtgcgcgtgcagctggtttcaatgcattcgtcgagcaagtcaacactgatcaaggttcactacaccgtgtcagagttggaccagtgcctaaacgggaagctgcctatcaacttaaagcgcaagtggcggctaaaatcggcattatcggcatggtacggtcacacccttgattaccaatgtccctacaactccatgaaaggcattcgtacatgattggctccagttcaccgttattaaagctgccgcgatgatcgatctgatcctagccatcatcatcttggtttcggcattattgggcctattacgtggctttgtaagcattataataagtacatcctcctggctactggccagctgggcgacatttgagtttggcaatacagcgagtcattggctagcaagccatggcgttccatcgactactgaaatattgtgtggttatgcgttggtgttcatcgggactttgatgacagttggcgcagtgggtatgctgatgcacgctgggatcaacgcaatacgtttaaacaacatagaccgcatattcggctttgccttagggacatttcgtggcggcttcattgcttgcgtactgttactgatgattggctacactccattggcgcatgaacctgtttggcgcaactcacgattggtaccattactgcaacctggagtctcatggatgcgtgctaagttgccgcagcgttcctctccattaacaccgcagcgcttgccattcacaaggccaatgataaacaggatgggtttaatcaacatatcagtatcagacgataatcaactgaacagccgtgtatttaccccccccctttgtctagtaatgaacacgataaatcgcattacgttccagtccaacctatcttctacaggccaacaaccacttattagtaactatatgtacgctggagaacataatctcctgcaaatctaaggttcacggcccagcatctacaaactcacagtaatgcagtcccaagaagctgcagcggagaactctcaatcatgtgtggtatcctcggtatcgttggcaatcaaaacgttgctggccaactctatgacggtttgactgttctgcagcatcgtggacaagatgctgcaggcattgccacggccagtggcactcgcttgcgcgttcaaaaggccaatggtttggtacgagacgtattcgacgagcagcgtatggcggtccttgatggctgtattgggattgctcattgccgttatccaactgctggttctgaggggatggatgaggcacaacctttttacgtcaactcaccgtatggcattgctctagcacataatggaaaccttatcaacacagaggcgctacaccaacaggtgttcgaagcggatcgacgtaacatcaacaccgactctgacagcgaggtattacttaacgtattcgcatatgagttagatgcgcagcgtatgctcactccagaagcggcaattcgtgctgtagcaggagtacatcgccgctgtaagggcggctatgccgtagtcagcatgatattagggctgggacttgttgcattccgcgatccacacggtatccgtccgttggtgctgggaaagcgtgtacataccgaaggtgatgaatatatggtcgcttccgaatcagctgcactcgatatcctagggtttatacgtatacgcgatgtacgtccaggtgaggctgtggtgattactgcacgtggcgaactgttttcagaggtctgtgctacacctaccaaccatgctccatgcattttcgagtacgtttacttcgcacgtccggattcgatgatcgataatatttcagtacataaggcgcgcatgcgtatgggtgtgaagttaggtgaaaagatcctgcgcttgcgcccgaatcacgatatcgacaccattattccgataccggatacctcgcgggatgcagcgctggaaatatctaacgtgctcggcgtaaagtatcgcgaaggtttcgttaaaaatcgctacgttggccgtacttttatcatgccgggacagggagagcgagttaagtcagtacgtcgtaaacttaacccaatccatctggagttccgaaaccgcgtggtgctgttgattgatgattcaattgttcgcggtaccaccagccgccagattgtccagatggtaagagatgctggtgcacgcaaggtgtacttagcaagtgctgcgcctcctgtgcgttatccaaatgtgtatggcattgatatgccagctgcagatgaattaatcgcacatgatcggactgagcaggaaatacaatcccttcttggctgcgactggttgatttaccaagatttagaggatctagaaaacgctgtgcgcgagggaaaccaagaaatcaagcaatttgattcctcgtgcttcaatggtcattacatcactggaattgaacggggctatttagatcgcatccgtcaactacgctccgatgaggtaaagcgaaaataatacaattaatatatttttcaataataaatttaggctaaagctaattacctatctcaaaaaaaagcggcgaacccagccccccggcatggatccaccgcaaagaaatattttcttatattaagaataactatgtttctaaaacgctatgctatatcgctatattaataattgaagatccatgaatcctagggaaatcaaaatacatatacttaccctactgattatacgtggtctcatcgaagaatcaatagttcatctcatcaactcaagagattagagggctttaattatttctttagcaggtgtctagtgtctaactctcgttccataaagcgagtaagagcaaacttttatttgtaaaacgagaaaccacatccatttcacccatgttaaatgtgggcacaaacattgcgtaaggcattttcaattgtatccagatcaggcaatagcgcttgagtttcactaagcagtacacgcatatgtactccctgcggtaatatctcctcagatgcatccgcaagtaggctgtcacgtgataccgaaatcaactgagggaatgagccagtaagtaaagcaaaataaggcaggtcagagtgacagccaagcgccttcattaggatcaccttattactctgggtagtcacttcctcatccaggccgataaagcgagcaaaggagaccaacggtaccttccaggcgtaccaaacaattttgccaactaaccaagaaggcacatcgttcaacgactcgaccgacacacctgacattacctcagccactaccgcatttggtaatagcactcgttcgctaccagtctgtataagaattccatggatttcatcttggttgatatagctcattgaaggcagtttccttacatatcaatgtttagtcggccaacgtgcacttaaagcatgtgctagctgggtaggattaccggagaattgtccatcgagctcgataagcgacgccgctgtgggatcgtaacagccggcacttgcctgacctgcaacccatccccccagattggcaaacgctaatatatctggaaccacggtcaggctagcaccactaagcaacagcaccgcgctattcgtaggggataattttgctaccaggagggccgttgaatcttctgaggacatacagaacacaaagacatcgttgctcaatgagatgcccagattatcccgaagcacataaacacgcccagcttgaatgcgatgaccagattcagccagatcaactggcaaagtggagactcgtcccatttggcggactagattaatgtattgaccaccatccagcccatccatttttatcaacactggatgtttgaaaccagcgggtaatgcggcgagtaagcgccggatcgcatcgggcccaccgataccagccagcactagcacagcaccgaataaaggcggcggcgcacaactctgagttggattaaatgtctcggagcgagtttggtcaacgatgacttcatcgaccaattgccaaccaagcgtccaagatcctagtggtgctaatggagctgctggcaatggtgctagtaccggttcctttgttgacaaggaagtcattaattgttcagtatttgaggccaactcggcatcatcagcgggtatttccagggatatctccgctgaatcatcgacatgcaaatttcccagattaggtgctagatccattgcaggatttgcttcaacattaatagcttgcggcaatgcattgtcttggccttgtaacttcgctaccaagtgccgactccaacgttgtgcctcccaaccttgacgacgagcaatcaattcggcctcatcgaaaatcacagtcaagccgggctgctgcagcaccacatccaacgtctctagcgcctcttctatcactggttcaagggcaattaccacaacttctggtgtgaccccaagcaaaattcgtatgtcaagtacacgaggatcctcctcaagtacaagatcaacacctgcttgtattaacacttcacgcaagcgctttctcgccgagccagcacaccccagtaatgcaaccaacttaccttggacgctatcattcccggacacgaacaacccctaataaatcatatacatttttcatcaaatcaaattcttggtaaggtttcccaagatagcgctgcacaccaatttcaaaggcacgttgacgatgtttgtcaccgctgcgagaggtaatcattagaataggtatactcttgaagcgatcatcagcgcgcatagcagcgactagttcgtaaccatccatgcgtggcatctcaatgtccaacaacatcaagtctgggatgcgttcttcaagcagttccagtgcttcaataccatcgcgagcaacgctaacactgaagttatggcgttccaatactcggctagttaccttacgcatggtgagcgaatcatcgactaccatgaccaatggcatctgagactgagtaaccggtgcttcttcaacctccaaatgaatcggctgatttaaatagcgacgcaccaaaggcgctaaatccagaatcacaatcacacaaccgtcaccagtgatcgtagctccatagatccctggtaccgaagcgatctgcaatccaaccggtttgaccacaatttcccgattgcccagcacttcgtcgactgctactgcaacgcgcaaatcaccagtgcgcaccaataataatggcacctgttggcgatcagcatgaattccaggctgcccaatcaggaaacctaggtcatacaatacgtactgttctccatcgtaatggtagctttcatggtcagatttgtagcgttcatgtgcaatccgtccgataccaatcactgaagccaccggaactgcaaaggtgctctgaccgatccgaatgaatactgcctgggtcacagctagtgtctgcggtagacgcagagtgaaggttacgccgtgaccgcgtaatgagttgatgctaaccgaaccaccgagctgactcacttcgctacgtacgacatccataccaacgccacgaccagcaagctgattaacctcatcataagtagtgaacccagaggtgaaaataagtccatccaactctgcatcactaagattgacatctatcggaatcaaaccacgctgcttggcacgacgctgaatcgcatctcgatccaaaccagctccatcgtcggaaacctttaacaggatttcagaaccttcgcgttgcagctgaatcgtgatcgtaccctcatcagcttttccagcagcgcggcgtttctcaggcatctcaagaccgtgtgctaccgcattgcgcagcatgtgttctaatggcgctaccatacgatctatcacgttgcgatccaactcaccgtgagtaccttccagcactaaatgcacatgcttgttagtatcggcttcagcttgacgcaccacacgacgcaaacgcggcaagatgctattgaaaggcaccatgcgtgcacgcatcagcccatcttgtaactctgagctaacccgaaattgctgctgcagtaggccatcgtattgacgtgccagctcgtcgagtaccccttgtagacccgtcaaatcagctgcagattcgtttaacgcacgactgagttgttgcaaagtggaaaaacggtccaattccaatggatcgaagtcacgtgaaactaggcttttttcgtgctggtaacgcgctacaatctgcgcttcagtttccaaatcaagtcgacgtaactgatcgcgcagacgcgtgttggtacgacccaactcagacatcgcattacgaaaagcacttaaacgctgctccaattgcgaacgatagatagcaacttcgccagcatggttgaccaagcgatcaagaagatcagcacgtacgcgtacctgctcctgaaccaaacgttccagagagctgtcctcgtcttgaccttccaaagggattggcgacgacagcggagggagtatgacaggcgtatctggaagaacctgtgattctttatcaagaagagtacttgaagaaacatcagcaattaaggaacgctcggcaacatcaccaaagtttgacatgccatcatgcgtagcaccctgtgtacgtgctttgagagttgcgaccagatcgctgggcatcgtcacaacgcgatgttggcgcgtctgtgtcaacatctgatgcaaataatcaaagctgtattccagcaagcgcatatcatcacgattgagcataatgtaatcagccatgactgattccaacatcgactcaatgctatgacccagatcaccaatcgcattgatcccagccatacgtgctccgcctttaagcgtatgcaagtcacgttgtaaaccaaccaataactcacggtcttgtggggcttcattcagctttgctaacaaattgtcacaatggtcaagcaggtcgctactctcctcaacgaagagatcgaccaactcaaaagctggttcatcaaaagccagcaacccaagttcattagcaggtgactcgttaccagaaacaaggtcgtattgatgtgctgctacatctaagttggtgtcagctgccaccacatcactcattgtcgatgcggccacattgtcgtattgatgcactacctcctgctgaggtctatcaacaataggcctttctggctcgactacagcatttaatggctcaagcacatccaagttaacacttaaatcgtatacatcagtcaatacatcgttacttagcgacacatcctgtgtttgctccgggacacttttaaggttttgttctgccacactttcaaagtactgctgttgcgactggccatcatcaggcattgtcgtcactaattcagacaagcatgagaccaaagacacaaacgaaggaatacgcggggaatcactccgcaacgcagtcaaggtatcggcaatcgctgttgccattgccgataatacacccaccccttcaacgctggctttttggtgcttagtaagcaggcgcttaatataagtctccgcagactgcatcacctgggtaatttccggcatctcagtcatagcgaaagcgccattcaacgtgtgtacggcacgcagtaatgactcgttgactgagtaagattggccagcagcagtatttaaccaatccttgatagtatccaaatggttagcaatctcggcttcaaggatttcacgcagtacactgtccacgaaaaaaggcgcgcccccctcaatcagctgaggtaccaactttaatgtggctgagtcgtcagcaatgctatctggcgacgtatagaacgcctcctcacctgatgcaaccaaatcaatcagcgcctgagttgcttctaaatcagtgctgatcgaagccttaccacgtaaagcggcattcatctccggaagtaccacttcacaggcacgttcgaccagtgcgacaacagccggactcgctgcacgtgaaccatccaggacacgattaatcaggttctcgatcttccacgcaaaatgacccaaggtgagagccccaaccaatcggccacttcctttgagggtatgaaacacacgacggatctgacgcaaactgtccatgtcatccggcgcagtaccccagatcgtcagcaagcgtcgtagattaccctgctcttcatcaagctcctcaagaaatacatcccggatatcactgtcgataatcaccccaacatcatcttcgaaacctccagacgatagcggtgcaacaacagtaggtatactttggataaccggctcatcgtcaggcatggattcagtgggcaactcgctgcgtcgatctccttcatatagatcagtaacaatgggctgcaccagctccctcaacgatgcgtcgaagatgtcggcgctttctggctcaactaatgtaagggattgtgataccgcctcctgaaaggtaaccgttccatcttcaaccacagtcagttctggtagcgcttcgtcaggagcagagaaagtcagcacatctgtactctgttgggaaccaacgctatccccctcttcagcagggatgggccagtaagacagtgcttccagactgttacgtgtgatttcgagtatgtcctcacgtccaggacgtctctcacgcaacgcttctaaatagtattccaaactggccatcgcatcagccagagtgtccaactgacgagcagcaggcacacgacgtttggtaattagctcacactcgatataacggcgtacaccctccagatagcttgcagcctgtgacaactcaagaattgacaacgcaccgccaacttcgctgagcaaacctggtaccttaagcaagcgcgcttggtcccaattactctcaatgaaagcaataaagcattcacgggctgcagtaaaattgctaatcgcctcatgcgccagaacatctaacgtccgacgtgtttctgcgtttgccagcaccacatccgcatcagcctctgcacccaagttggcgacttggttgtccaaggaagcatcgacatggagcaatgcgccagcaatctccaacaacagcgcctcatcagctttctcatcggattcaacgatacgcaataacgcatcacgctgttgcaggaccaagctgccagccatgcccaaacccatcattgctaaagtatcagcaacactactcagttcggtgatctgcgtccttaaatcagtaacatcgccgccgatacgcagatacagatccaaagcttctttgactcggagcaactcttccttgactgcactggcagctgtatccaacagttggcgattacacccagtcagactgctacgtgcatgatcaagttcaacctcagtggcattgcgcacctcagggtcgaaagcaaataacacattctcattcaatcttgattcgccacgcgcagcacggatctcgttaagcagaggcagaagaacaattggaatatcccgatgaccgttctgcaagcgttccaggtaatcaggcagcaatagagtgccgcgcatcagtactgcacaggcttcctcgcgatcattgactccatcgacttgcatcaccttggccagccgttccatttcctcggccaccattgcgggagcatataattcaagcattcgcaaggtaccttgcacctgatgcaggtaatcagcgcaagaaagtatccgactagtgtctacagggttctcaacgaataactcaatctcctgacgtgcttggcccaaagcttcatccagatcaggctttacccagccaagcacagcatggctcatcgcatcacgaagtgcgttcatcgaaattcccctgccacgcgaccgttcaaagaatgacgtgaccacatattccgctttgatatgatgctgtacttcaatctgctcatcctttccaagccgagaagcattcaagctggcaatttgaagttggctgctgatcgacgcaattcagcagccaacccagctaaacgaccgatcgattcagcagtcttcccagcaccttgtgaggtctgagaagtaatttggcgaattacacccatcgtttgagtgatgtcagtagcagcagctgcttgttgatgagcagcaatggaaatgtttttaattaaatggttaagcgtgttagatacgtgttcaatctcaatcaatgcagtacctgcatcttcagccaagcgcgcgccagatactacttcagcagtcgtctgctccattgagctaacagcctcgttagtgtcaacctgaattgcccgtaccaaactctcgatgcgacgggttgcactagaggtgcgttcagctaaacgctggacttcatcggcaacgatggcgaaaccccgtcctgcttcgccagcagaagccgcttgcactgctgcattaagcgccaaaatattggtctgttcagaaatatcgttaattaattctacgattgaaccaatctcttgagaggactcacccagacgcttgatacgttttgaggtttcctggatctgatcgcgaatttggtccatgccctggatagtttcacggactacaccagcaccctctgctgcaatcacaacagaacgctgcgctacttctgccgactctgcggagttgcgtgacacctgttcgatactagccgcaatctcactaattcgctctgagactgtggtgatttgattggcttgatggcctgcggcctccgccaagcgcatcgcagtggtctgagtttcatgcgccgataccgcaaccttggccgaagtagtattgatcgtggcgaccaattgacgcagttcatcaacagcacagttgatcgcgtcggctatcgccccagtcatttcctcggtgaccgaggccttcacggttagatcaccttcaccgatggaaataatctcttccagcaatcgcatgattgcctgctggttacggctattaaactccacctgagcttgataacgctgctcttgttcgcgtgatcggtaaatcaccgtactccaggccagaccaacaatcgacactagagacagcaacccaaatatcacagtgagccagaaattggggaaaatacgtgtatcgcgtaccgagccaaccccaaatgtcgaaaacgcattaaataatttattactgtcctccaataacttacctgagccattcaccaatgcatcgacagaggattgcgcagcaaatagctgatgcgaagtcgccaggatcgtatcaacgtcctttttcattgttgtccacagggactgcgactttgtcagtgctgacagcgtggcatcattgcgaacaggagatatccctaactcctgattgccattgcgcaaaccctccagcatccttgtgaacatcacagaatcccgcgccagtgcatcgccggctgcggctgccccaaccccggaagtacgcatctcagcgacacgccgcgccatagtgccggccactactacctgctgcagtgtattgtagaactgcgagggtggcgcgccactagcagtcatcgcacgtaccacctcgtttaattgtgcctgaagctgaggcacattactcacgaagcgatcagcgttactggctaaaaccaatgttgccgattcgctatcaattaactgctttgcattcttactcaagggcccccaagtatttttcagttggaacaaagcatcagaaaccgaactttcattgttatagcgagcctcaagtttcttgacagtatcttcaattttgcttttgatttccttaaaattggaaaacgcttttgaatctccagcgaccgcttcgcgcccctgactaaccaactgctgcgacaacacctgcaagttagccacatcggcactggccccagcaagccgcctgccttgccaagttgccacaccgatattggcgctaaatacaatcatcgacaataagaacaaaccaatccaaaagttggtactcgggccgtcaaacttttggctgttgcggacattcggggagctacccatgttcgacctcaatctaaatatgcaagacgggaccgccaatcaggcagcagcctgtctaaattcaggtgtccgcgatagcagcgaaagcgagaacacgcaccaggactggccatcaaccaaaaacacacgttcaataaaatgagcataacgcccttgggcgagatcaccgatctcgatggcattactcaatgaaaaactacgctgtccatagaggtcatcgataaccagtgctgcattatcaatccctaagcgcatgatgagtacacgctgcccctcacgtaatacggtacgctgtccttccaaaaactgtttaagatcaatcacaggtaatagactacctctcaaattacctacccctaacaaccaaggctgagcacccggcactaatgtcaccgtaggcattgggacaatctgaacaacctcactaaagtcagatactaagtttctgcttccaatacgatagccaacaccgcgccaaatatcgaccgaaaatggcttttcaggcaactgcatgctgtgtaagagactacgccgttcgtaatcatcaagaatatcgaatgggaaacgcatcagatgaacagtcaggttaaacagctaattttaaaggattaacatatgtacggatggcacttaacaactcctcgcgtgtaaaaggtttggtcagatattgttcggaaccaaccacacgaccgcgcgccttatcgaataagccatctttagaagaaagcatgatcactggagtcgacttaaacaagttattgttttttatcaacgcgcaagtttgataaccatccaagcgaggcatcataatatcgacaaaaataatctgcgacttctgatcagcaattttcgctaaggcttcaaagccatcaatagcggtaaccacctcacacccttcacgcttaagaagcgtttcagcggtacgtcttatggtttttgagtcatcgatgaccatcaccctaagacctgcgagttccttgccgctagcaacacttttaatcattgccaatatcctcatgcgcacagcgctctgaatctaaatactgtgtactgcaatagcagacgcaaacagtaaccgtgaatgaaaatgtgctgacagtcaagaaaaacaactaaaaactggcaagcactggcgattgccgtataaacgaggaacctagcatcgcatgcaagcaccatatagggcaaaacaggcacactattagctccctaaactcgctaacatcggcatctctgtttcaaatcaggttgacctttaatgccgttggacgtcgttgttgtgatggaccccatcacaggtatcaaaatcgccaaagacaccacctttgcattgctgctggaggggcagcgtcgcagccatcgccttcattatgtgcaccctggtagcctcagcttaaatgaggggcgtaccttcgcacaaatcgcaccgctgcaagtacgcgacaacaagaccgactggtacaccttgggggagttcagcgagactcaactcggccaagggcaaataatcctgatgcgtaaagatcctccagtcaatgctgaattcatctacgacactcagttgcttagtatcgcccaagccgctggtgctcaagtgattaaccacccacagggcctacgcgatctcaacgagaaactagccgcgcagctattcccacaatgttgcccaccaactcttattagccgtgatatgagagcactgaagatgtttgttcagaagcaagagcaagcgattctcaagccactagacgggatgggtgggcattcaatatttcgcagtagcaacggcgaccccaatctcaatgtgatcctggaaacgttgacagatggcggacgcacactggcaatagcgcaacgctatctgcaacaaattatcgaaggcgacaaacgcatcctactgatcgacggagtccctatagaccattgtttggctagaatcccacagggtgacgaattccgcggcaacatggctgctggaggccgcggtgagagccgccccctcaacgaacacgaccgctggatcgctgctcaagtcgggccagagatgcgacgccgtggcatgcgttttgtcggaatcgacgtgatcggcgactacttgactgagataaacgtcacaagccccacctgcctacgcgaattagacgcacagtgcggcctgaacatcgctggccaactgttcgatgcaattgaaactggaggctgatatggatgcggtcaatacagcccaaatccgagaacgtcaacgtctgaacgcaacactggttctgtcgattctcatacaccttgcgctgattctaggagtaggcttcgcagtcaccgacaacgctcccttagtccccaccctagatgtcatctttagccaaacaagtaccccactgacgcccaagcaagctgattttctagctcaagctaaccagcaaggcggcggagaccaggataaagcgcaacgcccgcgcgacagccaacctggcgtgataccccaagagcaagtgggaatcgccccacaaacacaacgcgcaacacaagcacgcgcaccagaaccaatccaaccgaacgtcatcaccagccgttatggcaaacaaccgcttccagtacaacaaacacgtcttcaagatcgacattcacagcctaaccccaccgatgcaaaacgcgaacaacggaatgcagagatggcacgcttagctgctgaagtaaacctacgctcagaagagtatgccaagcgcccaacccgcaaatttatctcagccagcacacgcgaatacgcttatgcaaactacctgcgtgcatgggttgatcgtgccgaacgagtcggcaatctgaactacccggacgaggcacggcgacgtcggctcagcggccgtgtgattatcactgtgggcatacgccgtgatggcagcgtagatagcagcagagtactaatttctagcggctccccactgctggatgcggccgcattacgcatcgtccaactagcacaaccattcccgccacttcccaagacacaagacaatgtcgacgtactgcatgtgacccgcacttggctattcctacctgccggcagcttgcatgacaatcactgacatgacacgcatccatgcgcatttatttatcataaattcattacgatgcttgaccataccatttttataaaacctggaacctttgcagcctctgacatcgttccagggcgcgtaaaaaatgaagttttccaaagatttcttaagccgttcttatgaaataaccagcattgatatgattcaaatggattctattctttcaagaacaactcacctcaacccccataaaataaaattacattgaatccaatagtttgaatggcataggcatagacgccaatgctaatttttcattagagaggagaatactcgtggagtatgtagatatattgtcagaaaaaacgataacgatactaatctttatatgtttactcgttttttctgctatctatatctcctggcgagtaaactctttctaccctattcatatgcgcttactacgcttatttatcagcaagagtgatattgaggacccagttatcagcaaacacttatcgaatcaagcggctttaattacttttcgtatggcttttggtattcagtctcataccttgcgtgatgcaaaaaaagtagcaaatttcgcagaaagtaaaaatatatcattgaatcttattgggaaagcgggtgcagcatttgacctgaatacgtgtagcatcaacaagaaaaaagtaccaaagagaatttcatgtgttttattattcatactctcaatgattttaatctttgcagcattcatgtctggagtattcgcaacaagcaatcgtcttttgggtcaactaaatgaaacaggcacttggattttattatctgaaaatgaagcgaaaatgggatcttctttttttaatttatttggaagaaatgaaactataaatataaaaaattgcaacgctaaagaaatcgttacagaaaaaagactcaataacagagaccatcaaatcatttgcggcatatggaatagtgcatccataaaaaagtcactccagaaaagtatcaacgggcagcagaaagccctgattattttgatgatagtactcctttggttctttatagacttaatcaacaccacaaaaaattggtattgtgcaattcaactaaattccatgttgggcagtaaaccataaccatccgttttacaacttaaatcgttgccaagccagtcaagctttcattaaagagcgcctaagaaacgccgcatcaacggccccgccttcccgttgcactgtcgctcaatcacagcgcttatagacctcatcttgagacccaagctatacatacttctgaccccataaaaaaactgcaactctcaatcaattagacaagtgttcaatggccgcaacacaacacagatactcccctaagcgttgcagtaacgctaagcggttagcacgcagcatcagattttcatcgttaaccatcaccttgtcgaagaactcatcaatgggtggccgtaaccgtgctagacaggtaaggacactgacataatttttgcaatccaatgcactgcgggtatcggtgatcacaccttccaacgccacgagtaacccgctctctgctggttgatcgaacaatgtcgcatcgactgatgctggaatcttaatttcagccttacgcaaaatattacggatacgcttgttggcaactgccagcgcctctgcctctggaagagcagcaaatctgccgatcgcatcaagacggcgatgaaaatcgtataaagagacaggtttaagctcagcgactgcattaaagtgcgttgttggaatgcccttatccgcatagtaaccacgcaaacgctctacgatgaaatcgtaaagctcttcaattcttgcagatttctcgtcactgacttggggcaccgaatgcttaacagccgcttcttttttcgactgtttcactgattcctgtgcatgacgctcctgctcaatcgtcgtcgcaaacgcgacccagtctgacgcttgatccagtagcacttttaaatccagatcgaaccgactctcaatcatcgttcttgccaatcccaacgcattgcggcgcaacccaaacggatccttgttacccgttggcttcattcccacagcaaaaccacacgccaacgtatccagacgctcggcgagtccgagcaccttacccaacggcgaacgtgcgatctcatcaccagaaaagcgaggccgataagcatcctcaatcgccattgcgacctcgggtaactcaccactaatcaaggcatagtgatgacccgcaatcccctgcaattctggaaactcattgaccatgcgagattgcaagtcgtttttactgagcaacgcaacacgcctggcaagcaatggatctaccccaatctgtggcgcaatcgcttcagccagtaccagaactcgcgcaaccttgtcagccagcgtacctaacttcgcatgataggtgaccgtccttagtcgctcccccattgccttcaaaccttgcttgagatcctcattgaagaaaaacttagcatcagaaaaacgcggacggatcacacgttcatagccctttgcgacctcagcaacatcattggactcaatattggcaataccgatgaacttctccgtcaacttccccaaactatcgagtacaggaaaaaatttctgattcacctccattgtttggatcaacgcctcctgtggcacttcaagaaacacacgctcgaagctacatagcaccgccgacggccattccaccaaattcaccacctgcgccacattatcttcagtgatccgcgcaactccaccaacctgacgcgctacggcctcaatctcagcaacaatgcgagcacgacgtgcggcaggatccaccaacacatacgcagcctgaagaacatcaatgtaattctgcggatcactcaacgacaccggcttgtcatacaaaaagcgatgaccacgactgatacgaccagccttcacccccatgatctcagcctcaaccacatcctgccccaaaagcatcaccaaccaatggactggacgtgcaaatagatattcatgagcgccccagcgcatcggcttgggaataggcatccccgcaattgcttcagtcaatattcctggcaacaacgcatccgtacgctcgccaggcaccaccacccgatgtacgaaacgctcgcccttggtatcacgaatacgctccaatgtcctccaattgacaccacatttagcagcaaacccctccaacgccttcgtgggtttaccttcggtatcaaacgcagtattcagataagggccaaacaattcgcgatactgctttggctgctccactgccacagccgtgagtaacacagcaagccgacgcggagtcgacagagacttggcctcaccatgatcgaccacaatgccacgcttctccagcccagccagcaccccctcgaaaaatgctcgcgacaagttcggcaaagcattgaccggcaattcctcggtcccaagttcgatcagcagtggttttagttcagtcatgacaataggaccttggtctccgtttcttccgcgaatggcaactagcggcgcaccacagtgattcgaaacggaaaacggataaaaggaggcaactagcgcctcaagttcggaaaacccagtttctcacgctgagcgtaataagccttcgccacctcttgtgacagtgtacgtatccgaagaatgtaccgctggcgctcagtgacggaaattgtgcgacgcgcatcaagtaaattgaagcagtgacttgccttgatcaccttctcataggcagggagtggcaaaacagcctcgaccaatgctttagcctcgcgctcgcaagcatcgaaagtgtggagtaactcagtcacatttgcgtgctcgaaattgtaagcgctctgctccacctcgttctggtggtagacatcgccatacgttactggcgtaccatccgggccatacgtccacaccagatcgtaaacgttatcgcagctctgcaaatacatacacagccgttccaacccgtaagtgacctcacccaaaacgggcttacattccagcccgccagcttgctgaaaatacgtaaactgcgtcacctccatgccattgagccagacctcccaaccaaggccccaagcgcccaatgtcggggactcccagttgtcctcaacaaagcgcacatcatgcaccaacggatcgatacccaaggcctgtaatgaagccaaatacaactcctgaaggttgtcagggttgggtttcattgcaacctgatattgataataacgctgcaaacgattcggattttccccatagcggccatcggtcggacgccgactaggctgcacataagcagcattccacggttccggacccaacgcacgtaaaaaggtggccggatgaaatgtcccggcccctacttccaggtctagcggctgaaccaacacgcacccctgctctgcccagtaccgattgagagtatggatcaaaccctgaaaggttgtgctggtagaaatagacagtacaccccgagaatcagacatgcagcaaacgccttatgaaagcaggacattagtatactcaccgaactgctgcactatttcatgaccaagatactcattgagtcactcccagcccatgcagagagcactggtatcacccctaaaattccgaccgacaaccctacatcatcaatgactgtagagtctgaacctcaatgaagcactcagaatcagaccgagatcagaacaactcacctgttgatctcatggacgactcgcattcctgttaaaacgcatcatctctcacagcatcgcaaaccaaccacgcccttcaacacgcccgcgccctcccctagccacgataagcgttgctaatcggataacgtcgctctcgtccaaacgcacgctgagacaccttcggacccggcgctgcttgatgacgcttccactcattgatctttaccaaattcagcacatagtcaacgacccccgccgcataaccagcggcgatgatgtcctcacgtgactgctcttgatccacatagagagacaaaatgccatcaagcacctcatagggtggcagcgaatcctgatcagtctgctgcgcccgcaactccgccgaaggcggccgatgaatcaccccaggagggatcgctaatacatcgctaaccgtattacgccactgagccaactcaaacacctggctcttataaatatctttcaacggcgcatacccaccacacatatcaccgtagatcgtcgcataaccaaccgcatattcacttttattgcccgtcgtcaacaacagcccaccgaacttattggctaacgccatcaaaatcaccccacggctgcgcgattgcagattctcctccgtcgcatctggagccattcccgcaaacaacggccccaatgcggctaacaacccctcaaataccggctcaatcgccaccgtttccagcctaacccccaaactatgacactgctccgcagccaaatcattggacaactcagccgtatagcgcgacggcaaccgcacggcagtcacctgatcagcaccgagcgcatcgacagcgatcgcaagcaccaacgccgagtcgatcccccccgacaaccccacccaaaccttagaaaaaccattcttacggcaataatcctgcaccccacgcaccaccgcacgccacacgagcgcattgatgctcacctccgactccgcgacccattgcaacgggacaaaacggcgctcagaacgcatatagtccaccacgagccactgatccgagaacgccgccgccgcaggatgcacccggccatgaccatcaaccactaccgaagcaccatcaaaaaccaacgcatcctgacctcccaccacattgagatatgcaatcgctgcacccgtctcacgcgcacgctcggctaacaacgcatcacgctgcgcgtgcttcccgcgctcatagggtgaagcattcggcaccaacaccaactccgcaccaccacacaccgtatcggccagcggctcagagaaccatagatcctcacagatcaacaccccaaccggcaccccttttactttgaacacacaacgactgccattgggatcaacttcaaaataacggcgctcgtcgaacaccgcatagttgggtaactcacgcttccggtaagtctgctcaacctggccgtcacaaagcacactggccacgttgtacaccacactccccgcactttgcggccaaccaaccactgcaacaataccgtgcgtcgccgctgcgatgcgttcaatcgccacctgacaatgcgctaggaaacccggacgcaacagcaaatcttccggcggataaccactgagcgccaactctgggaacatcaccacatcagcgccgtgctcatcccgcgcctgctcgatcaacgcgatgatgcgctcagcattttgcgccacagcacccacaggaaaatcaaactgcgccatcgcaatacgcagaaattcggacatatctcaataaccttatgcatatccctcttgcacaccggcaagaacagtcaacgcccactgaatgaatagagcctgcacacccaccacttagtaaagtcacagaactcaacggacccacattatttcagaagcccaggcaacgtcgctccatttacatcaatggcataacaccctctgcaaaaactaacccacgccccagcatgtcccgcacttcacccatacagcgactacaaaaatgatgatatgaccgccctaatcacctcacaccaaacaccctatggcctacgtacagcgaacaatccacaacaccttgccgataaaacatccctctacctcaagagcaagcatgaatagataaatgaccaagcatctacacctagttactgcgcaccgtatcccctctctgacacaccatgcgactcaacctcaatcgccacatagatcacctcatgactgctcggacgcagacatactccactcatgattgactccacacgacaccgcagcaaaccgctttgattgatcacacactgccgcgcccgccaacccataccgctgaaacctgcaacccattgcaaaaaccacattccagcaactaaaaactgcctgcacagctatcactctcatgcgtaacatcgtcagccagcacatggcaggccaatcattgatcaccgctaacaccggaagacatcacacacggcataacagaaattagagaataaaacgcatcaccgcatctttaagaaaacatcctcaagtgaaaccacgcaacgcacaacacctgtcataacctcatcgtgcttgtatgaaacagtgattgcctcaaaatactgcaccactgacccatccacaccacaaacactggattcccatgccgcatccttgcctctcctgtggcgcctgctgtgcttacttccgcgtcagctttcattggagcgaagccgatccggcactaggcggcaatgttccgatagaactcaccgaaccactgcgtatccacgaacgggtcatgcacggtacctcacaatcacatccacgctgtatcgcattggatgcggagatcgggtatcgcagccgctgtacgatccatgagcggcgtccctccgtatgtgctgccgtccctgcttccctggaattcggcacacgcagccaacaatgcgacacatcacggcgagcacacggattacacctgctgaccgaagccgactgggcaggcgtgaccaacacagaacgcaacccactgccgaacgagtaaacaacatcaccgcaaccgccggcaacacccgcaggatgatccaatcatgcccctcccatgtgcctgcttttcaaaaacaatagcgacccacaatcacgatacaagcaacaccaacaccggcagtcagtcatgcccctcgatccgcaagcacccatacggcggcgaccttcccagcactgcaccacaacacccagcaacgcaatacaggcaagcgcccttatccctgatcgcgacttcctgcctccccctacctcttgagcctcaccacacatttaccttaataaagagaacaacacgacaccgcatggcgcggcacacaaacactaccgacaggattgcccgcaaataaacaccatccgccacacatgcaattgcacctattactatggatgcgcatcaagaaacgcacgaatcgccggcaccagaacactgctcttatcttccagcacatagtgaccggcatcagcaaaaacctgtacctgcgcacccggcaaagcagcgcggaattcatccaaacaatgatgatcaaacacaatatcctgcatcccccaaccaatgaacaccggacgatcagcaaagtcaggcagtgccttgccggtagcctctaacaacggccaagcacgatcccctggaccacacggaatatcctgcataaaacggatgatcgaaatccgattggcccaactgttatagggcgccaaataggcacggcgcaccgcacgcggcaaccgtgtttccacccccaaccaggccgcacccagtgcaaaagcattcaacccacgcaccatccattcgccgaacctccaatcacgccccaaggcaatctgccacggcatcttcttagacgtcggcatcggaaataccgccgtgttggtcatcaccaagcgccgcacttgcacagcatgcgccaacgcccagccaaacccgatcatgcccccccaatcgtgtactgccagcgtcaacggcgtgacatcgtcaatacccacatgacgcaacaacgcatccaaatcatccacgcgagattgcaacgtgtaatcgtaacgtggcaccacacccggcgcgtcccccggcttatctgacagccccataccaatgtgatccggaacgatacagcgatacccatcacgcaacgccgccaccaaatgacgccagtaataactccacgaaggattgccgtgcagcatgaccaccaccgctgcgtcacgcggcccttcgtccagataacgcatcctgatccccggacggacctcaaaacactgcgagagaaaggggtaatcgtgatagctcatacgtgacgtaaccgatccaatgtgaaaacgccgtctgtttccagacgatgctctaagacccgcaagtgatggaacacccgcccgccacgctgtcggcccacgataaacacccgaccatactccggatggaccgcagccgctttttctacctcccgcggccccccccacagctgagcccctttgacttccaacaatgcaatctgtccatgcgcattacgctgcgtcatggccacaacaaaatcagggtaaaacccttccccatcgtcccaacgatacagcgccaccgattcgggacggcgtacaggattgcggtgccaccaatgcaccaacgggcttgcatcaagttgctgcgccaccacggtttcatcttgattgagacctgggggaaacaccccatacagcccacgttgcgccttctctagagggacatcgctgtgcaactcagccggtagagacactgcgacatcagcgacttgagcatggcggaaacgtcggtaggccactcgcagcaactcaggatgacgaaccaacaccagctccaattgctgcaacaacgcctcctcatcctccggaggttcagaaccggcaagcacaatggcctggcgaaacttttccagcaaacgcaactgcaactcccggtcattcgcctcagacaaacgcaaccggatctgctccgccttttcggcgaccgctaccggagccagcgtcgcccaaagatcagtctggcactcctcctcactgtgctgcacgccggagaacagcgccgattcaacacgcatcacacgctcacggacacgcaaacggctcgctagtacagtgtcattaaaatcgatgaaatccattagctgtgcctcaaaatctgcaggaggatcaggcaagcgttcactacgcaacatggcaggtgcatcttcacgacgccggtagtgtttgagcacgccctgccccatacacagtaatgcgttcacagtcgatgctgttgatgcggcggcatcctttcgcgggtgtcctgactgagcgccgacccattccaatatcccctgagcggcacgcgtccagggttcccatccttcctcaatgagtgggtcaccgaccgcatcccgcgccatctgtgaagtgcgctccaccgcatccaacgccacgccttggggcgaaaccagcagactcaatggttcaccgctacgcaccacttgtacgtgcgagtgctctccaatgacagtcaccacggtctgcgtgcccagctcgggactctgggtcgtcaatgcattgatctgctgccctgcgtctagcaagccttcttgagactgcgcattagataagaagacgtatccgtaatccaacgactccggaagagtcacgcgcccttgcagcaacgcatgcttgcgcacgatacggccaatcacctggataccaaatgcagggtcccgagcaccacgcaacgctgccaaggtaaacgcgcgtggcgcatcaaaccccaaggccaccgccatcttaaaaatcagcacttccacagtaggatcgttggccagggataacaacgctggatccggttcatcggccgtatgtatccgtactgcttcgtgatcaaagtgcagttgctccgtcaaaaaacgccgtgcctcatcttgtgccgcacggccatccggcacctgcaccaacatcagcggcgtcaacgccacaccagcatcagccagtaggcgcttgatcatccgatgtgtttcggcacactgacgcaacgccagatgttcaaagtcaatcaattgcgccgcatccccatcttgcgcaatgaagcgcaccatacgcacgccgtacttgagcaacccagcctgcaccgcatcgaaacggctgaccatcgcccactctgccgcttggcctaccatgtaacccgtcgcacgctcaaatgccatcacatctgcatcacgcggcgtagccgtcatcagcagcgcgtaatctggcgccagaacagactgaaaaaagagacgcgcttgatggccagacagcgccgtatggtgagcctcatccaccacacacccaatgcggacgccctcttcacgcgccaacgcaagcaatacatccagcgacataccgctatcgccgttggttcgcgcccgacgaccttccgtattgcgcaccgccacagcggcccaggtgacgacaaaaacaccaccactacgcaccgtttcccaacaacggtcggactgtagatcgaacacatccagttccggcgcctgcgccgcaatgacctgacgcgactgctccaccagtccggaaaacggcgcaaaccaaaaccacaagacgcgctcacctgtggcggacacacggcgcattgtttccaccgcgatcagcgttttaccggcacccgtgggggcgcacagcacggttacggcatcgttgcaacgcgcctgcgtccattgctccggtggcgcagcggcaagctgttcgtacacacgacgtacttggttaaaacgggcaacgatccccgcacacaaggtttcctgaaattctttaagcgtggcaggcatgattaatctccgaagcatcaccgcagcgagggaggaaccagcaagcaagacacactgcacaaacgggcagtgatgctgggatgcggtgaagaaatgttttgggttgaccgtggcggtgtttcaccatgtcgctcagtacgatgcggccatcagcaacgatgcagggatcccgaacattgttgagcatggcaggcctcttcaacgtccgaagcgggcacgcaaatattggggaatcggcaagcaagacagtcccccgatgcgttcggttaaacgctccggtgcccagctatacaacatggccccaactgtcgcaccagccagccatgcatccaaccgtgtgatggaagacacgcggaaatccgccaagtaagccaggacatcgccagattcgccatccacagtaaaaccacatgccggccacggtgtcagtggtttgccatgcagcagttgcagcgcatgccacacttcggcatggtccaatttcatcgtgaggcgatgtcgtggaatacggtgtgcccgcaggtaagcaaaaccaccgcccaatccggcgactgcctgccccttggtattggtatagccgcccagtacgcgccggaggcgctccgcgcaaacatcacggcacagatttttgtctggttgtgcttgcgtcgcctcggtgttgctgatcaggatgaacctgcggtggccgccatcttcggcgttgagtttggcgacggcgtgggcagtggttccggaaccagcaaaaaaatcgagtacccatgcttccttgtcagtagcaacactaagaattcgttcgatcagggagacgggcttaggggtattgaacatcttttcaccgtcaaatatcgccatcagttcttttgttgcctctgtggccgttccaacatcattccaaatcgtaaaaatatttttccccttccccgccgcttcaaacagaaaacgtttgtactgcggcttgccggtgccatgtttaccaaagacgatacgtccctctttcagggcctcaagatatctgtcttcggtaaacctccaatggcggccttgagggggaagaaattcttttccagtcttcgggtttttgattggatatgtcagattcttcctgatattgggcgcatcgaaaggatcggcaacccaaggacctctctggtcaccatcagtgttattgaatttatcggcatcaacaggcaatggattgagggagaagcgatcacgagtccgggcatagcacagtgtgtagttgtgtgccaatgacacatcagtatcgttttggcttgatttccggtgattccaaataaaattcgcaacgaagttctgctcaccaaacacccggtccatcaacatccccaagcggaacaactcgttgtcatcaatgctgacaaaaatgacgccatcatcggcaagcagttccttggcgagttgcaatcggcggtacatgaattccagccacagtgaatggcggtaacggtgcgtcttgtcaatgaagcagtcgttgtagacaaagtcgcggttgccggtgttgtacgggggatcgatatagatacagcggatcgcaccgcggtgcgtcatgcgcagggcgcgtaaggcgtcaaagttatcgccctcaataatcaggttgggccagggggcagcgccgtggctcagttcggtatccaatgacagggcgacgtaatcatcgttcactgccgcatctgcttcgatctcgtcgcgctcccacaccagtcccaattgacgttcggcgtctcgccgctgtaacaggcggatcagtgcgtcgcgatccagataatcgtattgactcggcattggggtgttatttcactcaggccacctgacaggtgggcagttaaggaacatcgttagatcgcaaggtgaatcaaggggtgatcaatgcacagcgtttgttctggtgccactggcgggcgtatcacatgtatctcatctggcacgttgaggggaaagccaccggagaagtcatgttgtcagccttaagatcttctgcattacatcatgtcctggagtgttgctagcgtggcttaacaagtaccacttaggggatagggatcgcagcaacacgccaaaacaccaaagctggtttatgcaggatgcactgttctccggtgcaccgctgtattttgaaggatgctctaaacggctccagaaggtgcctcgagaatcttcatggttaggtttgagagcaatgttttgaggcgggcgcgactgtattttccatgcgtgccgttgcattgagcattgatctgtaaggaatgaacatgctgggaaaatccgaaagattcccagtcatttctgcaacatcaagtgcctatcggcgcattttggcatcaccacaccacttctgccatagaacaattcagcccagaaccaatacccagcaaggcaatgcggtcaccttttttgagacggcccagttccttgagcttactcagcacaatcggcacagaagcggggccgatgttgccgtactcacggaaaatggtcatcaccttggcaggatcaatgccgaatgacttgataaacgcctcagtgtgtgggcggctgacctggtggataacaaactgatccaactcttccaccgcccaacccagcacttgtttggcgacaacaaaagttttctttgccagtttgatcccctcaatgagcatcaagcgagtgtcagtaaccatgcgatccagattcccgcaacatagcttgttccattcagtcgccgagcgggtcactccccctttgtattgaggtgcatcaggcaccaaagcggtacgcgctagtaccatcgccaccgcaccgcaccccagggttaaggccgccatttcctcgcggaactcctgctcggtaacacctggggcactcatccgctcaagcgttttttcataaacacggttagcagtctcggcgttaaccaccaaggcataatcaatgtccccacgctccagcatttgtcccgcaatgtccatgccgtttaggaaggccaggcaggcattggccacatcgaaggcaatgcattgctcgccaacaccaaggttgccggagacaatcgaagcagtggacggttccaggtaatcgcgactcaccgacgtgttgaccaccaagccgatacggtccacagccacccctgcatcctgcaatgctttacgcgctgccatcgttgcgacatcggaggtctgtacgttggtattccacaaccggcgtgcattgataccgacaatatcggcgaagacatcgcttttaatgccaatccgctcaagcatcggttgcaaacgggcgttaatttcttgcgacgtgagtgtacacggggcatcaatgtgagccagtcccgcaatcgagacattattgaaaagcataaaatgagtacgctaaagtaaataaaaaatagagccagattccaaaggtttccggcggtttaattaaaagttactttagcgattaaacgcttttaatgcacctttatagtgttccagactagtgccactaccactgtgccgcgttgtgacgtcagcgaccaccgcaacggaacgccacaaatcgctgtgtaccgtcaacaggctggcccagcgcttgaaccgtattggcgttgattgaaggggcttcattacgcgccagggtttccaactcatcctgcacacgtaacgcattccgggtatagaacccaattttattcttgacggataccgtaatttcaccctgtgattggcagtcactcggcaccgcaccccagggcaacacacgcactgtttttccaactgattcaatcgggacccaggtgcaggcagaaagagtggtcacaaaatacaaagcaaggatcaaaacacgcataggacagttctacaataaatgcatcgaagtgtttgattgtgccgcaatcgtcgaacttggcaatggtggtattacctgtggttcgagagaattcaagctcaaacctaagagcgtcaccatcattgatgcgttgctctgctcattaatatgcgccgaacaaattaaaacagtagctgcctcgacgctgacgctacactgctctcatgtccatgcctctctacgatgtgctgctgtaccagcccgaaatcccccctaacaccggcaatgtcatccgcctgtgtgccaatactggcgcgcggctacatttgatcgaaccactcggttttgatctcgacgaccggcgactcaagcgtgctggattggactatcacgaatacgcccggatgcaggtacatcccaacctgagcagtgcactggctgcaatcgcaccacgacgcctatttgcgctcagtacacgtggccaaatgcgctatgacaccccgactttcagcacgggagatgcttttattttcggtccggaaacccgcggtttgccagacactgtgttgcataccatcccggaatctcaacgcctgtatttaccgatgcaaccacaaagccgcagcttaaacctctccaatgccgtcgcggtgatggtatttgaggcatggcggcaacagggctttcaatgacaatgacaatgacaatgacaatgacaatgacaatgacaatgacaatgacaatgacaatattgtgctgatcttgctcatgagcaacaccacgttaagccagtgatgctaagaggtgcttttattaactattcctaaataagatgatgtttcatagtgctgattatagaatgactaaaaatttgcagtaaaagcagtaaaatatgccctaaaatacaagaggacggtgaaatgaaatcagaaaaaaaacaatgctgattacagcattattctctctcaactgagaatcgcgagacttttggggcacaacttactggttcttaaagataattctggtaagttaatatcagaaatagacggactggcaaccagcaaaaacgggggaggactgttggatatatgccttctgacagacttaaagcgtttgagttcaagtctgcgttcttatataaaagctcacaggcgcagatagcattgatcaatgcgaataaagaaatctctctgaataaatggaatgttgcattaaacacaattactcttatcaatacaaaaaatcttccctatcctatatttggaatcggtagaaatagtaattcagtaaccagtacactgataagatgcatggatctgcatgaacccaaaataccctccggaggtattgcaccgttttcaggggaaatgctgcttagcgaattcagaaatagaaaaactctagaacgcgttgatctcaaggtaaaaacaggaaaacgcaaattgcggacacagactgttcaggtacccctgagaagctgaagcactggtaagcagtagattgctacgacctatgaattcacttcgctgctgcatatttgtcgacactcacatctgccgtgagtagcctgatgccctcgacaatagcctgcggcatcaaaagcatcttcatgtagtggaggcactaaggtgacaatagccaacgcaagcttgttgtagatcggcaactggttgtacccgttctccaacaagcttctgcaaagtacacctggacccatcttgaaatcgtcgcggtccaaaccccaaatacggcaatcactttcacttaaaattggaccaggcggacgtgacgcccctgaaaaagcatatcaaggcaactagcctcaaccatcactcgtctttcagaatatctcctacttttttagaatatctcctaacttggcctacccatcggctttgaaataactttcaaagcgggaataaacctttgttccgccataaaaccaaaccgtttgacctggaaagggtccggtgcgtcgagagcaatgacccaggcattccaggatcccatcctgacaccgggaagacctacaatgctacctcactccactcccggcggttttgctttatggcatccgattttctgcccgtacatcgggcactgttatctgtttccgacaaaacagggctggtcgagttggcgcgcgcgctgctggcctacaacattgaattactgtctaccggtgggaccgcgacaatcatccgcgaggctggtctcccagtgcaggatgtggccgacctgacaggcttcccagaaatgatggacggccgcgtaaaaacactgcaccccatggtacacggtggtttgctcggacgcgccggtatcgacgacgccgtgatggccaaacacggcatcgcaccgatcgacctgctgatactgaatctgtatcccttcgaacagatcactgccaaaaaagattgcacgctagccgatgcagtggacaccattgatattggtggcccggcgatgctgcgctcggcggcaaagaatttcgcgcgcgtggctgtggcaacgtcaccggatcagtatcctgatctgcttgctgaactgcaggcgcaccacggccagctttccgccgaaaagcgtttcgcattggccgtggcggcgttcaaccacgttgcccagtacgatgcggcaatcagcaattatctgtcgagcgtgtccgacatgcacacaacgttgccgttgcgccatgaattcccagctcagttaaacaataccttcgtaaagatgacagaactccgctacggggaaaatccacatcaaacaggtgcgttctaccgcgatgtacatccgcaacccgggacgctggccaccttccagcaactccaaggcaagacactcagctacaacaatctcgtcgatgccgatgccgcatgggaatgcgtacgtcaattcgaagcaccggcctgcgtcatcgtcaaacatgccaacccttgtggtgtcgcagtcgggaaggcgtgcagtgatgcttacgaagaagcgtatgccactgatccaacgagtgcgtttggcggcattattgcggtgaaccgtatgctggatgtggcgaccatgcagagcattctagatcgtcaatttgtcgaggtgttgatagcacccgattacgatgcagacgccctcgcctatgcgaccaagaaggccaatgtgcgcgtgctgcgtatccccagcactggcgtgatgaatcgctatgatttcaaacggatcggctctggactattggtgcaaagcaccgacagtctgaacatccattcggatgcactgaaggtggtcactcagcttgctcccaccgatgcacaacagcgtgatctgttgtttgcatggcatgtcgccaagtatgtcaagtcaaatgcgattgtttacgccaaggacaatcgcacgattggtattggcgccggacaaatgagtcgcgtgtattcagcgcgtatcgctggtatcaaggcggccgatgcacatttggctgtcacaggttcggtgatggcaagtgatgccttctttccattccgtgacagcattgatgccgctgctgccgctggcatcaaggcggtgattcagccgggcggttcgatgcgcgataacgaggtgatcgcggcggccgatgaacacggcattgccatggtcttcaccgggatacggcatttccggcattgaccggaaatcggttcctcgatagctgcacatgacacaagtgctgcagtgcatccgatgcaaatagcgaaaccaaccgtgacagaccaggacgcttcccacaacaacattaacgccatgctgcaacgcacttccctcttcattcatctatttcattccctatgaaactccttgtcatcggttctggtggccgtgaacatgcactggcctggaaactcgcccactctcggcgtgtctctgaaatcatcgtggcgcccggtaacgcaggcaccgctacagaaactaaatgccgtaatgcgccagtcaaggtcaccgacctggacgggctgttggcgttggcacagcgtgaagcggtgaacatcaccgtggtaggtcctgaagtgccactagtggcgggcattgttgattgcttccgcgccgccgggatgcgtattttcgggccgacagccgccgccgcacagttagagggcagtaaagcctatgcaaaagactttctggctcgtcacggtatccccacggcgcgctatgcggtgcataccaatgtcgacgctgcaatcagcgacgtgcggcagcagggcgcccccatcgtcatcaaagccgatgggttggcagcaggtaaaggtgtcattgtggcgatgaccgtgaccgaggctgaagcggccatacgtgacatgttgtccggcaatgcgttcggtcatgcaggggcacgggtggtcattgaggaatatcttgatggagaagaagccagtttcatctcaatggtcgacggcacacacgcgctgccgatggccacctcgcaagatcataagcgcgtcagtgatggcgacataggcccgaatacggggggcatgggtgcttactcaccggcaccaatcatcacggacgagatccatgcgcgggtgatgcgtgagatcgtcaatccaaccgtgacggggatgatcgctgacggtacgccgttcatgggatttctttacgctggtctgatgattgatgtccatggcgctcccaaagtcattgagttcaacgtacgttttggggatccggaaacgcagccgatgatgatgcgcttgcaatcggatctgttggatctgattgaagcggcactcaatggcgatcttgacaaggtgcaggcgcagtgggacccgcgcccatcgctaggtgtggtgatggcggcacgcccgtatcctaaagcgcctatcactggggagatcatctcaggcctggacgcactcccagccaatgtgaaggtatttcatgcaggcaccgctcttgacgcggcaggctgcgtcgtcacggcaggcgggcgggtgctttgtgtaaccgcactgggaagcaatgtgtctgaagcacagcggcacgcctacgccggtgtggcatcgctgcattgggccaatgcattccagcgcagtgatattggctggcgcgccatcatgcgggagcacactgtgacgttgaacgtccatggccctgtgtgactcaggaatagaatgggtttgtatcttataagaccctgggagcggcttgctcatgaacgtgcgctgcctagcagcacggcactatccagtggcgagctttggactttgtccgatgttcttagccattgtccccagagaaatagccacgtcaccctgagcaagcgcaacggtatccataaagtgcccgaccctagctacgatctctatcacaatgccatcctgattgaactgaaattctgcctagtaacaaatgtgttgctgtggcttacattgaggcagcacgcgatactatttccgcgccatcacaaattttctggaactgtaagtatgaaaattgagtgcatcggcctgaaatgcgcacaaccgttctacaacgctaatctcaagaaagcatcagcattgctcgttcgttttcagagtcaacagctcagggaaacacgcgttttctctttttctggttttcttaccccctctatgcgatttgaatccaaatttctggaaaaaccggtttgagcaactccattagatcctggataagtaaccttaagttcgggttcaatcatctgtggacacatgagaaaaccagctacttcctgcgtgtgctgatcgcactgtcggtcacagttgctatctgctggaagaaggagcacctggatgcagtcggaagccttttcctgggaatcattgccagtgctatcgcagagactgacgataactggttaggccgtagcaaagcggtgttgctatcgctcttgtgttttgctggtgccggtgccagcgttgtgtttttattcccgcatccaggatggtttgtgctgagtatggcaatctcaacgttcgcgttgactttactcggtgcactcggcgagcgttatgccttgatcgctcaagctactgtggcttttgccatctacgcaatgatcgacgttgaccgtggcagggatcagccgtggcatggtgtcacgttattgatgatcggtgccacttggtatggtgtgctgtcgattctatgggtcctgttatttgcaaaccgcccagtgcgcgaacggctgtcacgattgtttgaagagttaggccactacctgcaacttaaagccgatttattggaaccagtgcggcaaagcgatttatatgccatacgcttggcactgtctgagcaaaacgcacgcgtagtcaccgcactgaacgatgtaaaagacgtgatcatctctcggttcggtcgctctggtcggcccggcatgcgctctggggtgtacttccggctgtattacatggctcaggagttccacgaacgcgccagttcctcacactatccttatgaagcgctgaccgaggcatttttccacagcgacatcctgtatcgctgccaacgcctgctcagccttcaggggatactctgcgccggattggggaaagcaatccagctcggtcgtccgttcgtttatggtgaggatacgagtctggctagcgaagatttatacaagtcgctgaatttcctaaaaactcgcaccaaagcagcacaaaagcgcttactgggtgcgctggatctgttagtaagcaatctgcaaacaatcgagcggcgtctctttgaagctgcacagttggataccgccaccgagcagatggacatgcggttaagcgattcatccccacacagtttgagcgaaatgataacacgcctgggggagcaactcacccccaattcgatactgttccgacacggtctacgtatggccatcgcattaagtgtcggctacttggtggtccatttgatgacgaccatcaatggctactggattctattaacaactgcctttgtctgccgcccccactacgacgcaacacggctgcgattgatacagcgcatcctgggtacactgcttggattagtaatcgcctgggtgttgatgcagttgttctccagcatcacattacatctgctgtttgctctgctcagtacgctggtctttatcctcactcgtaccgaacgttatatggttggcacgactgcggttacagcgatggcgctgttctgttttagcctcatcggcgatggctttgtaatgatctggccgcgcctgttggataccctgatcggctgtgcgattgctgctgctgccgcattcttgatccttcctgactggcaaggccgacggctgcataagatctgcgctcatgtgattgacacttgcaagaattatctggaaaaagtcctcgaatattatcgtgatcagcccgttgatgacctggagtaccgtattgcccgtcgcgatatgaataatgcggatgcggccttatcagcagcgctagcacatacgctgcgtgagcctggccgctatcgccgcaatcttgatactggattccgcttcctggcgcttaccaacacgctactaggtcatctgtcggcgctaggagcacatcgcgcaccactggcagacgtatcaaacacagcgcagttagacgaagcgagtgcttatgtaggagagggattacaagcgatcgcacgtgcattggagaaacgcaaagccccttctattatgaaagaaacacagatcgaacaagagttgattgatgcactggaagccatcaaggaatctgaagaccgcacccgtcacttgctcgcgattcagttggcgttgctattgcgattgttacctcaactgcgtgctggagtcactgcactgatgcagccgacaccgactgaagacaatcaggagctaaccacaacgtaacccacctgttcagcacctgatgcaggaataatgctctgtatcactgatcaaaagtgactgcatggctttcccactccaagggtgttgagtgaggggattggaaagtactcgaccaggaacgccaataggtgacgatagacataaagtgtttgatcagtatgcctaatacagtcaagtgaagcagctaacaatcactagcaatatcagcagcgcgatccacagcaacagcactcgccacaccaggttcattgcatcgcgcaactcaggcaggtgccgccacaccgacactaaaccagagttgtcatagtcagccacttcttcgcgcatctcgccgcgtacgctggcgcgcgccacatcaccgaggaaagcaagcccaaaattaaaacggttgccccctgcctcacgccaagcacgaaacacagtatcgaagttacctacaagcgccatcgacagtgccattagctgcgccactggccattccatcatcgacagaaaacgactcgccccgcgtctgttagcaggagacaaataggccgacaaacgactctccaccgccagcgcagtcaatcggtacaagaccgcgccaaacggccccagcaacagaaaccagaacaacagtgccaaccaacgtcgtaatgcgttgagcaccacagcttcaaccaacgaagggatatcctcatacaagctccccccggctgcttgtagttttttcactgccaagtgtcgagctgacgcatcgttggcatcaatcactgcttcaacatcgcgatccagatcacgggggccccaggtccaactcaccacagccaccccgaacagcaatgaaaacaggccatgccaaacaccgtccaaccaccattgcagcaacatcaccccaaataagagtggtgccaatgctaaccacaagccgtatgaggtctgccataggtcatatgtttggggcagacgaccaatccaagccagccagcggccgaaccagtcgaaagaacgcaatgctgctacctggacgggaatcagatgtcctaaggcaagcgcgacaatcaccgctatcactgtaatgaacatagatgaagttcctcctgacacgattctagctgagctatctacgacaaccatctcctaggattcatagctgtctgcacattcagccagccgtgcactacgcaggcatatcgcaggagcggcaggcacgatgaaaaccgacagcagtaacgtaattgtccagaggacttcagcactgtatccgtgcttgcattcagaaacttaaggccctactttcgggaagatcacaagcccacctagccggacgctcgttcaccactcactcacactctctgcctgtcatcacgtgctcagagaaatcctgtaaaaaaaacagttatcactatcaatcaatcttgcgatctctttccaagtacttaaaagatcaccgtgaaaagcaacacaacatgccttaccaaatgtccgattggattttctcaccaaagccgattgcatcgtttcagcacaattatggcaagcaatgcgccgaagtcaggatcattaagccctttgctacacgttgcttagcaaccaagattatgagtccttagctatatcacccgaaattagattcaagcaatgctacattcccgttgccaatttgaaacatctcaactggtaagtacgacaatacaataggtgcaattcattacagtgccatgcaccaaaaaaataggacgggggaactccccccgtcctaagcgttttcattgctgaaaacctgtacttaccactgataacccacacctgcaccaatacccacttgactacgggtatttgcactaccgctgaacttgaacacccaacgtccgctttcagaaaccgaagaaacacccaccgcaatcgcagattgccctcggtaactactaacgcctacggaggtcatcccgcgtcccggaatataagcctgtgggagatttgctgttgcaattgctgccgccacaccaccgtcagtatccctacgaagactccctacgaccccatccgtgtactgtttggcagtgatcaagccttgattgagttggcttacattgaccgcatcagtatcagcagtgccagcggctacattcgtcacctgcctctcagaaccagccgatcccacagaaacagtgtttgcacggtcggctactgaatggttaccaatggcaaccgcattgtcagcagacgcactggctttattacccatcgcaatgctatcggcacccgaagcggtggcaccgacaccaatcgctgttgcatcgactccagctgcaataggagtggcactattgttcaggctgttcaccttaacgaaagtctgcccttcgctaaggctttctatcttgttatcaacataacgattggcatcttgagccacccgatcaagctgacgcaaattcaccgcatccgtcgcttccttggcatcagccacattactcactgtgcgggtttcacccttggaagcatcacctaccgaaacagttcccaccgtattgttctgtaagcctgaatatttaccggtgtaactctctgccccacgtgcgccatcctttgcaccatcgcccaacgccacgctgccatcagcgctggcaaccgcgttacgaccgatcgccgtggagcctttcccactggccgccgcccctgaacccactgctgtcgctccttcagcggatgcaagcgtgccaacaccaacggctatagacctagtgcctgtcgcaccatcgccattgtagttacctccttgggtaccaccatcatacgtactgtagtaatgcactgatttagcgccggagcccgccattgcagtattaagttggcttagattaacagcatccgtgtctgcagtacctgcggcgacattcgttatcttttggctgccagcattaataccagaactggtcaccgaaggaccatccgtaataactaatcccatcgaacccaacgtcacgccactccccactgtcacaccattggtcgtcatcaccgtgtcgccaacggtcaatttgtccagtttcaaactgctggacagattgaaaagcacatcattgctgccgctttctttgctgatcacgatgtttccatcggtattcttcaggtctaccgactcacccggcgccacattactgctgttggctccagaagccagcaaattccaacccttactggccgtactgctcaccgcttgcaactggctaaagttgacggcatcggtatccgcagtacctgcggcaacattcgttatcttttggttaccggcgctaatgcccgagctggtcacagacggaccatctgtaataactaatcccgtcgagcccaacgtcacgttactacccaccgtcacaccatcggtcgtcatcgccgtgttgccagtggtcaaactgtctacttttaaagcagtggccaaattaaaagtcacatcattactgtcggttgttttggtgattaagaggttcccgtcactattcttcagatccaccgactcacccggcaccacattactgctgttggctccagaagccagcaaattccaacccttactggccgtactgctcaccgcttgcaactggctaaagttgacggcatcggtatccgcagtacctgcggcaacattcgttatcttttggttaccggcgctaatgcccgagctggtcacagacggaccatctgtaataactaatcccgtcgagcccaacgtcacgttactacccaccgtcacaccatcggtcgtcatcgccgtgttgccagtggtcaaactgtccgcttctaaagcagtggccaaattaaaagtcacatcattgatgccgattgctttggtgattaagaggttcccatcagtattcttcagatccaccgacgcacccggcgccacattactgctgttggttccagaagctagcaaattccagcccttgcttgctgtatcgctcaccgcttgcagctgaccgaagttgacggcgtctgtatccgcagtacccgttccaacattcatgatcttttggccggccgcattaatgcccgaactgattaccgagggaccttccgcaatcactaatcctgtcgaatccaaggtcactctcttgcccaccgtcacaccatcggtcgtcatcgccgtgttgccagtggtcaaactgtccacttttaaagcagtggccaaattaaaagtcacatcattgctgtcggttgttttggtgattaagaggttcccatcactattcttcaaatctaccgactcacccagcgccacattactgctgttggctccggaagcagtcaaattccaaccaccacccacagattcagcaagcaacttcagctgggcaacattcaccgcatccgtatctgacctacctgccgccaatcctgtaagttgacgtgtctgggaggtgctagaggttatattaccgatactgactgcccccaacgtacttctccacattgacgtggaaagagtcgaggtgctcttggtgaccggatcatagccagtaatgccagaagcggtcgcagccagcgagccttgtcccagtgccacgcctcctcttgtggtgacactgcttgatgcaccaagcgctatcccattggcaattgatgtcaatgctccattacctatcgctatcgcaaaattgcctgtagtggatgcaccggtccctatagaaatcgcatcttgagattgcgaacgggccgtagtaccaatcgcaatcgaacgcagcccctgtgctacagtggcgccgctggtattcccatccgttttggaaccttgccctgaaccgatggcaatcgaatctatgccagccgagccattcatggtagcaatgctgcctaggcgcatagaataagttgcaccagaaatatcgactagcccgagtttaccctcattgacatataaggacccaccaagaaccaggtttctataatcataaaacagggaatactctgtttgcgtgaaatctggcttgcatttatcgttagaagcactatgaatgaaggatgtctgactactgtcgcccagtatttctacgcaattttcagtcgagtcggaatttacatagacttgagctgctactttccccgtatatcccgttgaggctgcaagcactgtcaataagacaatgtgcaactgcctccggtcgtgcagtttcgcgctacgcttagctgtcatcgcattgttggaacgtcgtggctgcgtaccttttttacttgaagctgctgacgtcatcactgcgtgttgcagcgactgaccgatcttgtatttcggcaaaaataatggatcaacaccttcgattccacccaaccgaaccatgggcagtgcagtatgaatttgcataacaatactccttaactttggctcggcaacaccgagcatttgagactatgaattactgtggatgttaagaactgccaatagaattaagattgagcaaatttatagaattgattttcgttgcctatatggctctcctaaacattgcaattgtacacaaataaatgtgatgaatgcacgattttagtatcaagctgttaattggtgatacaagaaaacaattactgagaaatcgaccttaaacagatgtacgcttataagattgaccataacaaccactgcttatcgttatcgagaagtcaaaagtaaactttaatcgttaccaaacaagtcgcaacacagcaatctacaagtaggcgatagcttaattattaaatagaaatagaccaaccactctcagcatcttcaacaatataatcacatccaccaacgtaaaatattgcatcatcaataccacaaggtcagtttgaaaaaatctcgtactgatacaaatatagtcagtatttaaattgacatttcccaagaaactccctattccagccacttacttagatcacttctcctgaaatcgggatgaagccttctcagattgctcattcttttgcgattcataaactatttcatgaatattgaattcatctcaaaagcaaacacattttcaatgtgacattataatttctacatcctattcaggtttatccttcgttgaatacctgatcaaaaaatccatgaaagtgaaaataacgtcaaaatattattaatagtaatataccggcacgaatgaggttcacttgactggatctgtcataaacacaacctaccatctataatcagcacttctaaaatttattatcagccgtatttaacctgtacctcccttacctttcaaagagagtgagttcaggtaccatgcatgttacacatactttttgctcatcatggaccattccaaacaacaaaacgcatccatcacccaagcccaggcagaagaggccgtacgcacacttctacgttgggccggcgaagatcccactcgtgaaggcttgctcgacacaccacgccgtgtcgttgaagcatacggagattggttcagcggttaccgcgaagatcctcatgactacctgcaacgcactttcgaggaaatctctggctacgacgagctgatcgtactgcgcaacattacctatgaaagccactgcgaacatcatatggcacccatcatcggtaaagttcacattggctacttaccaaacggcaaagtcgtcggcatcagcaaattagcacgcgttgttgaatcctatgcacgccgcttccagatacaggaaaagatgactgcgcaaattgcagcatgtatccaagagacattgaccccacgtggcgtcggtgtcgtgatcgaaggtgcccacgcatgtatgactacccgaggtatacacaagcgtggtgtatcaatggtcacctcaaagatgctcggtaccttccgtgaagacgcacgcactcgcgccgagttcttacagttcatcgaagtaggtaccaacgtgatggacttatgaataactccggccacatcggcagctaccgttcccttcgctacaaagcactctagaagctgtgctttctgccgatcaggtgcctgaaatcatcagattgtttcggaatcttttacttgttatccggcaacgtgcgccacctggctgctcgtgtccctcacgtgcggccacagcacattgactaatcacattaaacatgaccatgcaccacacaattcgatcaggtgtagtcgccacccagaagacgcaacaaccagtcctcataccacgcttgcttgagtacacgagaaacacaacaaagccgccacctacatcacccaagaagactacagccatacaagcaactgttcgaatgcaaaactatggacataacgcgatcacgtgcaagccaaaagcaacatcaacgacacactcaccaccaaacacctgcactcatccatgacaacagcacagctgtgcaacagacaatcgtatgaaagtaccaaagatcgaatacacacctccccaatgacatcaaaacaagaaaacaagcccgcatattcaaaccgcagtacaccataaaaaaataccgatatatctcagtttagagagtcatacctcaaagcatcggggtcactcctgctgcgcgctatgatgcatcgcctggccgcatccctctggagtacacatgaacccgatccgcccattcctggacaagacaccgcaactgggttgcgccgtatacatcgatccaaccagcaccgtgattggtgatgtcatcctgggcgacgatgtctcggtatggccacagacagttatccgtggcgatgtcaaccacatacggattggtgcacgcactaacatccaagacggcaccatcatccacgtcagccaccacagcccctataacaccgccggatatccaaccctcattggtacagacgtcactatcggacacggcaccatcatccacgcctgcaccattgagaagctatgtctcatcggaatgggtgcctgcatcctggatggagccaccatcaaaaaatacggcttcgtcggcgccggagctgtcatcagccccaacaaagtcgtgggtgaagcggaactgtggctcggtaacccagcacgcctagtacgcaagctcagcgacaaagaaatcgaaagcctgcactattcggcgcagcattacgtcaaactgaaaaacggctacttaagtttaagcgcagaaaccacgagtaccccctctccctagcactcacgccacataataccctcatcactgcaacacccaaggctccatcaccgacagccccttaaggatccagatccccaatgcatccgcattcatgagcaatgaaacaacgcccctcgtcgcaatcgccaaaattcaaccactaccacgtcacgcacacacactgcattgcgccccctcgaacggtgtaagtgtctcctccacgcttgagagacctacccccacatccaacgccaacacctcccgatgggatatgtccatacccataagccaccaataccacggacccatcctgacattttcaaaataatgtcactctcacactggagtgcaccgaaaagccaacatagtggatccttacccctaacacaccaaagccatctgctgcgcaaagaaaaacatggccaaacgcttattcaaatgtattaaccaatttcggccactccccatacgcgacgacaagcactgcagcagtgattacctattccacctgactaacccatgtgctttgaacacacctgaaaatatcacgatggcttgctccgacacccatacaggcctcggacctccaatacttctcaatgacatttgaagatcccaaataccgctgagcgaaacgtgcatctcaaacactcaacaaactttcaacacacttaaactaaagtacgttggcggactgcctcaaacaacgtcacccctgctgccaccgagacattcaaactttcgacctcccctggcattggaatccgtgcaagcacatcacagtgctcacgcgtcaaacgacgtaggccgtccgcctcaccccccaacaccaacgccaccttgccacgcagatccaatgcatacaacgaagtctccgcctcgccttcaagcccatagatccatacatcctgcttctgcaattcgcgcaaggaacgtgccagattgaccaccgcaatgaccggaagacggtccgccgcaccagacgacgttttgcgtaccgtcgcattgataccaaccgacttatctttggggatgatcaccgccgtcaccccagccgctgcggcactacgcagacaagccccaagattatgaggatcctgtactccatccagcaccagcaacaatgcttgacctccagccgcatcaactagatcttttagatcatgctcctcccagagacgaacagctgcataacgcgcggctaccccctgatggcgtaccccaccgccaaccccatccaacgcttgcgtagtcaccctgcgcacctcaattcccttgcgccgcgcattttcctcaatatcaagcaaccgtgaattcttactgccagcctcaaccagcacctcacacacgtgctcagcatcattctcaatagaagacacgacggcgttgatgccaacaatccattggtttttcttattcatagcgtaatgagatccagagctgaaaaaaacgaactatcgtaagcattgatctccactaggactaacaacagcgcgcatctaacggcctttactgcccatcacaaaccaaaaactgatatccaccacactgcatgccacatttaaaacacaattggaaaatcttcatctcaaaaatggcagcggcactcttgcttctttttgactccaacggactgatcacgactgcaagcgatccagcaaggctgccctgaacagccaagaggaatatggagagaccagcggatcgtcccgccgcacatccacacccatccaacatcccgcgatcagcgacactccaaaccagtaacgcctcccctgctcgccaagtgcgacacagcaccttaaaactaactgcggtcagccccaaacatcaatgtgacgtcacatacaaccgcttcgcccgcaaaacctcaacagatcaccgcgtcttgacgccctttttacgcttggtcgtcgccttgccacgtggcaccggaggcgacacctcccgcggaacctggtcatgccttgactactcaaccaaccggaaatcaatcttacgctcctccatactggctttaagcaccaagacacgcaggcgatcaccaagccggaatacacggccacgacgctgaccaaccagcaccttacgaatcggatcaaaggaataataatcctgcggcaattgggtcacatggaccaacccagtgaccttagactgctccaactccacgaacaaaccgaagctggtgacaccactgatcacaccatcgaactcactgccaacatgccgttccatccatgcagcacggtagcgctcatccacctcgcgttccgcctcatcggcgcgacgctcacgactagaacacaccaatgccaatgcgaccatgtcacgcggtgtatacaggaagcgctccggcgcagcaccactgagcgcatgcttaattgcacggtgcaccaaaagatcaggatagcgccgaattggcgaagtaaagtgcgcatagccatccagcgccaaaccgaaatggccgcgattctcagccgaatacaccgccaaactttggctgcgcaacaacaccgactccagcaatgccgcctctggacgctcccgaacctttttcagcaacttagtaaagtcaccgggctgcaccttcccccacgccggcaaactgagcttaaattctttgagaaactccaacaaatcggcgtatttactctccggtggccgctcatggatacgatacggtgcctgtacccccgcattgagcaaaaaatgcgcggcctgcacattggcaacaatcatgcattcctcaatcagcttatgcgcatcattgcgcatcaacatcccggcctgagtcacctcgccgcgattgtccagcacaaaacggacttccgatgactcaaattcaatcgccccccgctgagcgcgcgccttggccagcacctgatacaaccgatgcaactgctgcacctgcggcaacaacgcacccatctgcgcctgtgcctgcgcatcctcctcacccacggccttccaaacctgcgtatacgtcagacgcgcatgcgagttcatcaccgcctcgtagaaggacgaagacttgacctcccccttgcgatcgatctgcatctcgcacacaaaacacatcctgtccacactgggcttcaacgagcagatcccattggacaacgtctccggcaacatcggcacaacaaagcccgggaaatacaccgatgtagcgcgcgtgagcgcctcttcgtccagcggcgtccctggacgcacataatgcgaaacgtcggcaatcgccacgaccaagcgaaaaccccaacgattggattcgcagtacaccgcatcatcaaaatctttcgcatcctcaccatcaatcgtcaccaatggcagcgcacgcagatccacacgcccaccgaccatccctgactctaccgtcaacggcaccgccgccgccgcatccaacacctcctgtgaaaatacatgcggcaactggtgaccatgaatggccgtctcaacaaccaacgacggagtcaacgcctcaccaagcaccacaagaatccgcccaatcgccggacggcgtgtgtctggaggcacgaccaattcacacaccaccagttgcccttccgatgcaccgccgatgtgctccggtggaatctgcacgttccgctgcaaacgcttatcgtccggctcaacataagcgatgccgagttcatagaaaaaacgtccgaccagacggctcatccgacgttccaacacacgtgcaatcatcccctcacggcgaccgcgacggtcaatgcccgtgagattcaccagcacccgatcaccgtgcatcaccttgcgcatctcgaacggaggtaaaaacagatcgtcccctccctcatccggcttgaggaagccgaaaccatccggattggcaatcaccgtaccagcgattagattagtatgttgcactggcgcaaaaccaccacggcggttctgcactaactgaccatcacgcaccatcgcacccagacggcgcccaagaatctcaatgcgatcagtcaccccgaaccgatcagcaatctcctccgccgtctgcgggccatcgcacgcatccagcaaatcaaggatcgcctcacgactcgcaatcggctcagcatagcgttcggcctcacgcgccgcatgctgatcctgaaaaggcactgatgctgcagcccgagctgaacgtactgatgccttcttagcagaaggcgctgtgggtgcctgttgccttggagcattccattgacgtaaccgcttcgccggcgacaacctggcgtcttcctgttgcttaccgtcagcaccctgcttcttcttgttcgaaggcaccttggattgaaccgggacacgctgacgctttgcagcagcagacgtggtggtacttgcagtatgtggcgcttgagcgcccttggtggtttttttcttcatgaccacccatgttacctgtgagcacgcatcacgtccgctgaaacagtcaccttagataggctaatccagtaaaaatcattcacagccttcacttgttcaagctgtggaatcaatacaccctccagcctcaaaagagtgcacgtgcgctataacgcctagtcatccacacgatatgcctattacaaacactactggtctaataacggtgaatcctgagccacgctttgaaccgcactagatggcgccgaaagcaagcgcaaccccaactgttgctcaacttcatcggcaagtgtcaccagtgttcttaatcgtgattcatacaaccgggtaaaccccgtatgcagcggccgcaatgcctcaacataaccaatatcgtcacctcccagactgctcaacaaaggacataacaacaacaagtacttatcaagccttacctgagaatcctctgagacgatcacctgtgcagcacgcacaagccaatcacagatgcgcttccgatactcagccgcctgagcatacgcaacctcgacctgatccaaatccatctccggattccaagccagcaccaacaccaactgagcaagcgcatccaatgccttcacctccccctccaaatcatgcaacagatgcaacagacgccactgcatgtgcgcctgcttccgctgcacctccggcaacacctgcaatgccaaccacaagcggcgcgcgaacacccctgggacatctttcaacaccaatgggccttgatcgacaccaagtaacaggcactcagtgcgcagcacaagaacatcaggaagactgccatcatgcagcggacgactcacaccatgatcaagtaataccaacaccatctctaaccagtaacgccgctgctgctgctgtatccggcgctggctagcctgctgccaggattcacgtaactgctccagtcgattgatacatgcctgagcatccaatgtctcccaaggagcacattgcgcagtggcaggattcaagtcttccgcaatcaataaaccaccacaaaaacgttcccaagatgcatcgtggcacgccaagacactgtgcgacgcatctgctaaagaagggagtgcggtttgaatgcacaagctggcactgatccaatcaggggggagacgcgggagaaacagcgcctgtaaaagactgcgtcggcagtaccagagtacagcacccaacacactcaaaccgacgatcacgccccccccccatagcatcatgctatccccacgcggcaacaacccacgcgcgcgcgcaacattccacaacaagcaaccaccagcagccatcaccaacagccagccaagaatcaggccataccactcacgcatggcccctttagacaacctcaacaacgcaggttcacgatccttgaaatcagtcatgagcgttcccctaatcactactcaaacaagatgctatgccgagtaacccgccaggggcagccaagtctacagaaagcccattgggatttatcaaccactcacccaaatatgccatcgcgcatacacacccaaacgggcactggattcaggacagaaaccctacattcagcttaaatacaaacaaatacaaaagaacccagtgatttctgttaactgaatcaactccatgccatccctggcttccgcggcaacatgcacacgtagagaggacggcatccaagcactacaccgcaacaattcacaaaaaacacgcggcagccatcaacgggccttacccactgctccgatcactccttcaacatcccgagcggtaatcgaaccaaggaattgcttagcgacagtaccatcaggcgcaattaagtaactcattggcaaaccacgcggcgccgcgaaatttttaggagggttggaaatgtcaacgagaatgatcggataaacaacaggatgcgaccgtaagaacgtccgaatctcctccggcttactatcgtcgtaggcaagcccaaccacctcaacgtcccgccgccgccggtgtaacgccgacaactcgggcatctccttcaaacatggctcacaccacgtagcccatacattcaccaatacccacttaccacgatgcgcagccagatcgtacacttcgccaccgagcgtcttggcatgcaatcccggacgctgaatcgtaggttgctgcctggcaggatcgaccgcccctgcgatggacaccttctgcgcaaccgatacagccgatgcttcaatcatgccctggcaaacaacgcacaacaccgcgcaaacgacacccaacacacgtaagttcatactgtatctccacagcattgacagagaccattcaccatgcaatggtcgaaataatacatgctcccatcgtccccaataatccaaacaaccactacttccacatccgtacgactgtacagcaacaccgaagagacaaaacgcacgcatcaagcgctagtgcagcaaactgccaccaccgatacaaaactagaaccaaaaaataagaacgattcatttggatcggcagccaaagaccaagggcaaacatcccagaaagacaccaaacaatactcagaccacgttccataaaatccacaacatattgaggcaagtcgcggcagtgagtgtgttggagcgacggaaattagtaaacataaaatttgactattatgtttacttgcatacagataatcgttgttcacatccatgaaaagctccgctgaagcgggatggactagttcataaatgaccgataacaatgcatccaattgcagggtttgacgctgtacgaatccttccatctttcatccatgcaccgattaaagaatagtttggtgtgacggttgggattcaactctataggactgtgcatcttagtcgctttgaagcatagcgatgtacgcattggctatctgatcgaatagggaagaatcatagtgttctaaaagcggaagtccggctgagctggactgaggcacaatagaatgtttgatagaagttttggcgctgttccggcgttgcagcagagggacaacaaatcgctcgacgaagtggtgaagccaacgcagtgagtactaacgtagggaacttgcaaggtattatgtctgctttacatcagcgccctcgacctctttgctgaagcatttattgatagggctgcacattggcattcaatgtgccgactcattggcgaggtccccctatactcatagtcacactaacactgaccttccaagacaatacagctcaaaatgcagtgtctgcattcccttttttattccagctacagagaacaccccatcttcgcaacaccttaagtgcagactgacgaccaacatcgaaaacaatcactcttgcacacggcctaacatacacacagcagttccaaataccgctgccctctggattcacccatgaatactcccacacacactcacccacatccgttcggctccacggcaacgatccgttgcgaacgtgccgctgccgaactgcgtaccggtcgacccgtcctgttgattgatgctcatacgcgtcggcatgcggtcatggctctggatagcatgaccgctcaaagctttacgacatttgcgaacgctgtcggcaacactcactacctattcctgactccagcacgttccaacgtgctcggcctggaggctccccaaggcgcacgcatcccactggcgaccctgtcctacgacagcctggtcaagctcgcctacctgcgtcagccaacacacccaacaacatgggtgcctggagacatcatggatgcagcagcgaccgagatcactcgacttgcgctgcttctgccagcaatcgtcgccgccccattaacacaccataccgaacatgcctttgcagattgccaaacacttgatttaacagatctcgataccgctgccgcgggcgcctccacaacagagtacgaattggtcacacgtactccggtgccactccgtgatctaggcatgagcgaattcatcgtattccgtggtggcattgcacagcgcgaccaagttgcgatcttgatcggtcaacccgacctaagcagtgcagtccccgtacgcgtgcattcctcctgcctgaccggcgacctctttggctcgctcaagtgtgactgcggcgaccaattacgtcatggcttggccacactgaaagcccttggcggtggtgtgctgctgtacttggaccaagaaggacgtggtaacggcattgccgcaaaaatacgcgcctacggctaccaacacgtaggactggatacgatcgacgcggatgcacaactcggattcggcccggacgaacgccgctacaccggtgcagtgatgatgctacgcgcgctaggcatcacccggatacaactgctatccaataatcccaccaaagtagagcgtttacgcgcggcaggaatcatcgtcgagcaacgcatcccggtgataggacagatcaccgaacagaacgaatactacctgcgtaccaaagtcagccgtgccggccacgacctggacatagatgccttgatcatgacatcacagagacctcaagacccatcggagactgtcgacggcgagaccgtaaaatccatccccaaaaccggccacgcgtaatgcacctatattcccttccaccctgacaataaacaccgtctcaattaccgtggtattgcctgcacgcactgccgctgcaacacaccgagtcacctcattcacccatgcctatgctatgccctgctgattatctgagaagtcacatgctagcgcccacagcgactgtgccgacttaccacagcaacatggatacgacattacgattcatcgacagtcgtcgcattacgtgctatcgccacactacatgcactgtagcgacgcattgatggcagcacgaagtgacaccgtttgcatgactaagcattcggacgcacacgcatcacgcaggccccctacacacaccaacactcacatccacgcaggcccccaatagccgatgcgtttacgcagcttgaacttacgccatagattcaacggcttggcgcggcgattacgtcctccctcagcgacgaaggcatcaatagcctcaaggacgcgctcactagaacggccatcccgatatggatggatggcatccgcataagcacggatcacagacatcagttccggcggacgggacaaggcacgccggatcgccgactcaaactgagcaggatcatcaatatcgatcagttgcggcccaggattcctgtttttaaacgtcacgactggcttgcaggtcaacaggaactcgttcagcgccgaagacgtgtcggaacacatcatgtcgacatgcggaaacagctcaagaatattgtcattatcggaaaaacacagatgctcgctctgcagcgcacgatagcgcgcgaccacatctggactcatcttcggatggaacgtcacaatccaacgccactcaccacgcaacgacaaacgcttgatctcatcgtaaaggatgccagccgcactccacgacggcgagaacgtcgaatgatagagaatcactggtggctggcgtactggaaccaatgcttcgcttatctcgcccataaatggatcgatctttggccagccggtctgcttcactgcaaagtggccgagcctgtcggccagctcaccgaacgcagcagtatcacgtgggccagtagtgcaatacagatcaaagaaaccacggctatagacatgacgcggtttgcccgcattgaagccatgaaacacctcaaccttcacacctggaaaaaaatgcggcaccgcgttactactggtgatcaccgcgtatggcttccagagacgcacctgcgccacactgagtaactgctcgtcagccgcaaggtcctctgcgccgggaccatcgaagaaccatgctgcctcatcaccacgcgcccgaatcgctgcctgtagcggacgcaaaatcgccagtgcatagcgttctgatccgtacaacaaatagtgcttcttgttcattcatgctccaaacgatgcttacacaattgtgtgcgcgcctgttggatcgaatcaggattgcgccgcatctcgtagtaacgcatccgcttatagagcgcataactggcagccgtctgcgccaccacaaacccacgccaaccatcgagcatcgccaagcggagcacataatcctttaagaacgcagccacaaataccaacggcgcttgccacatgcgcgccgaccgcgctttgctattccagtccaacgcttttaactcggcataacgcaacaccttcaactgcttgtgcaccaacgtcggattgtgcagatgatggaacggagcaacaaactcagcactgccaccatcaaaacacagcgattcatggacactgacttcagtccaaaaggcgcggcgacgatgatacacacgggccaagcgctcccccaccatcggccggtaccaacgcatcggcgcccccatgtaccaggtactgcggcgcagccaaattgcggctaatggcttcccccgactttcatcgaacagcaactccggcaaacgccgcaaacattcttcacgtagcaagtgcgacagaaattcgtcagcatcaaggactaagatccaatcataggtcgcttgctcagaagcaaaattgcgttgcggtccaaaccccaaccacgcctgctcgaccacacgagcgccatgagcacgtgcaatctccaccgtgtcatccgtactgccacaatccaccacgagtttttcggaaacaaacggcacactgtccaagcaacgtgcgatattggccgcctcgttgtaggtcatcaccaccaaactcataggcaacaacacagcagactctgcctggggactgtgatcctctcgctccattcgcatctatactcttttcaggctgttctgataaagaatcagaattataaagcgccccgcaacttcacctcacgcaacgccaaaccaatacacacgccaactgccaccgcatagaaacttgtactcatctgatgcgaaaacatcgactgggtcataccacataacatgtaagccgccaccagcatcactcccgtcgctgctgggccacgaaaactcttacggccacccgccgcgtacagacgcagtagcaacacaaacggcacaccataaatggccaaaatcgccaacaatccagggaccccctgagtcgccgcccattcagccagatcattatgagcgtgccgtagatggcaacgcaccaaccactcatcaccacggcataccggtaacaaggtcatcgcacgatcaaactgcccgatcccaacacccatcaatggtttgctcaagaacgtggcataagcaacttgaaggcgctccagacgcgcgcctgtggaagaatcactgtcaccgctctcaagtcggcgcatatcggcctggagctccaccaaccgcatctgctcagtgacttgcggcacctccaaagccaatgcacctccacctagcaccaagccagctagcaacaataagcggacacgcaagctggcccaacggacagtcatagtcaacacaagcaacaccacggccattgctaacaaaaccccacggctaccactgagcacaatcacagcactgcacgccagtaacaccaatgacggcagtaaccaactttgcttagggcgcgcgaacaccaccataatagtcagtgccatagtgacgtcggcaagcacaatggcattcacccaaccttctgcacgcgtctcgccacgcaatatctgaatcactgccagcagcagaaccccaaatacacctagagcagcgccacaccacaaccattgcttgcgaggtcgcaacgcatacacccaaagagcggaccaaggcaacagaagaaagcgtgtcctgatatctaaatcacgcaaccccaggtgcatgacgatgatagacaacaacgacaacagcaacacactcagggctaataaaaataaaatgcgcagcggcgccacaatttccgacgtggcacgacgcaatcggccaaagtacaacacactcgttgtcaccagcacgaagccaaaaggggcaaggccaactggcagacagatagctaaagcaccaaataaaaataagccaagctcagcaccaatacgcgcccaagccaagccacgctggggttttagcattgtaaacgtcgtcaacagaggaggatcccggttagggcgcaattaatcgtgaataatctcacaaaaaaagccacgtacactgtccatcatatagccactacagcaagaccgtgtaatctttaaatagatagaaaatcgtaataacggtcagtcaaaacacgctcctttaacaaccgttccaagcaagcaatcagtaacacccaaacgtgtcttgctccagagactggaaaaaagatcacttacagcacattcctgaccataccaacaccatttgattcccacatctgcgcacagcagcacaccatcaaaatgcaatattctcgaaaatgggccccgcttaaacaagcgacaatggcgctgttttgttcggtcttgaagcatcagttcacataacacattcaattgaattggatagtaacttgatgcccccgatagatagtttcactaacttaatcacaatagaaagtaatgcgaacacaccgcatcgaatgtaagcgctatatctgcgccctttcatacgagaacagtgtacgtgagcaaactttccgaacgcgttcgtgaggcacgcaatctatgcagtctgacccaggaggcattggccagtgatcttggggttacacgcagtgcggttgcccagtgggagatggagcaagggaccaagccatctgtagagaacctgattgccttggcgcgccgtaccggtatggcttttgaatatctttccacaggtcgaggcaaacctgattgtgggaaaccgatcagcagcatctccgaaccaacaccgacctaccagaaattcgattcacaacaaaagctgttgctggaacaattcgccaaactcacgccgcgtcaacgcagcgggctgctcgaattgctgggaaccccatttgacacactgcgccgatgaggccggaacatgattcaataggatttcggaaccctccatcatcacacttcgatgaatcaactcccaccatccctggttagatttctccgcccacaaccgccaccttcgccaaccacaaacaatgcaccattggtcgagacgggaatagcaacaccctctcctgaaacaatgcctcaacaggatgcaagccctgcggaagcaccaacctttgcacatccaatagaaaacgtcttggcgacgcagcgtaaccgtctcctgaacgctctactgatcaccgtcttaaccttcacactggtgttgcagttattacttgctgaccgcgcacgtttggccagcaatgctgcatggcggcccttgcttaacacactctgtaccgtactgcggtgctcattgccggcttggcatgaaccgacagcctttacaatgctgcaacgtaatgtccaacccttacatgggtaccctggtgtcctggaaatcgaagcgaccttccgcaacgatgcacgctgggaccaggcttggccgtacttgcaactatcgctgtctgatgccgacggaaaaatcatcggcagtagcaccttcacgccaaccgagtatctaggtcaccctccacgtcccaatgagaggctaacccccggtcaaagtgcccatatcgttttccgtgtacatgagcgggaagcaaacaccgctgccttcacctttgaattccgctaaaacacacgtggcataagcaacggtcacgcgctagacttgccctccgcaaagcgcccgccaaacgtccaaagcccggaaatttccgttgaacgtagtaccctcccgtcccgaagtcagccgtggctccccaaagtcccccctacgtgaacatgtagctcaagtggtgcgtcgttatttgcgcgatcttgatggctgcgatgtcaatgatctctacaacatggtcctgcacgaaatggagattcctctcttggtagaagtgctgaaccattgtgaagggaatcagagccgtgctgctgcactgcttggtattcatcgcgccactctacgtaagaaactcaaagagtacggattagtttgaggtgttctggatacgatgttcagaactgtaaagatagacatgcagcatgtttctgttgcagttcgccatccaacaaagacggcagcagcagcagagccccccccccatgccttgcccgcattgcagccagccaacggcatcaagtcaccgaaaaggataggaaacgaaagtaatttattccttcaaatacgtcatccacccataacggtctggcaaacggccgtactggatgtcggtcagttccttgcgcaacgacagagtaacttcgccaggtggtgcgttgatgtttccgaccgaaaaaccctccgctttcaattcaccaattggagtgatcacagcagccgtaccacaagcgaatacctcgctgatcgcaccggaaactacgccctctttccactcctcaattgctaccttacgttcctcaacacacatccctcgatcacgagcaagctgcaagatactctcgcgggtgataccttcgaggatgctgccagacaacgctggtgtgaccaaggtgccgtctgtgtagacgagaaacacattcatccctcccagctcctccagatatttgccctcaaccggatcaaggaacagtacctgagagcatccctgggcctgcgccacctgttgcggcagcaacgaggcggcataattgccgccgcacttcaccgcacccgtgccccctagggcagcacgggcacagtctgtcgacaaccagatcgacacgggagcaacacctttagcgaaatacgggccagcagggctggcgatcaggtagtaagcggcgtgctgcgcagcccgcacgcctaagtacgcttctgtggcaatcatgaagggacgaaaatacaggctggcttctggtgctgaaggaacccagcgggcatccactgcaatgagttgacgcaacgattctgtaaacagttccaccggcaactctggcaacactaatcgtttggccgaacgctgcaagcggcgagcgttggcctctgggcggaacgtccagatcgaaccatcagcatggcgatatgctttgattccttcgaaaatctcttgcccgtagtgcagcacagcagcggcaggatccagcaacaatggcccataggcgcgtacctgggcgtcgtgccaaccattgtccttatcccaggcgatagcaatcatatgatcagtgaaatgaacaccaaaccctggcgcttgcaggatcatagagagcgcttcatcagaagtggtagacaatgagcgggcaatatcgaacgaaatggacactagaaaattcctgttgaagcagaagcaaaagggcagaaggagcaggtagcgacggatcagggaaatctagatttcaaaacatacctgtctcaagacgcgcactttcagacatcatgtgacgaccccaaggcggatcaaagacaagttcgacattggctgcaacaaccgttggaatcaactccaatttggaacgcacatcgtcaaccaatatgccgcccataccgcatcccggagccgtcaaggtcattttgacctgtacggtacgttggccatcgtcacgatgtcccaacattgcttcatacaccaagcccaaatcgacaatattgaacggtatctctgggtcgaaacaggcacgcaactgctgccacacgagttgctctactgctgcatcactggcatcgtcgggaagttgcaaccctgggggtggctctttgccaatcgcatctccatctttaccagcaatacggaataaattgccatccacaaacactgtatagctaccacccaatgcctgagtgatgtaaccatagctccccgctgggagggtgacacaatccccctgcggcaccatcacggcttcacaatcacgttcaaactgaacaggttcgctgctacgggaatacatacatggatagagagccgcgccatcaagaggcaagagagccattgtatcgtgttcgcccgccttactcggcagtgtatgtccgagtccgaagggaaacaccgtatcctaagctttctccaaggaagtcatgatgcccccacactccacgcccaacagggccgtacactggctttggcctcccctattgctccttgggtgcagcattgccctcatcgcctggatactgattgcccttgtcagtgaacatcaagcaggctggttcgcatttgctgtagcgcttgatgtggccggcatgctccatctaggtacgctgcgtagaggttggttgcgccttagtgtggcgctgaccgcaaccctgggaacgatcttggccgcaaactggggtatcgccgcaactcaaatcggtatcgtcatgggcttggatccatggtcttctgcattgaagatgggcccacgtcttgcatggaccttgtcgacattggccaatcagagctttgacctgatttgctatgccgctgccttcctattgagctggggtttggcacgtcgataagcccaaacgcaactagacacaccaaccagcgaagacactgacagattcttgagaaactgtaacaggtcgatgctataccccatggccattctccccacacatcctgtgtctcgggaatgctcgcttcaacatcgaaccaagtccccacctccatcttacaaaagcggttggcatcaacatcatcgaattcccccatcatgctccactgctcaaattcaaattgcactctccggtctcaggaatggtctaaaaaagatttctccacgtttcgacaatctcctgcaatgtgtcatacagcacggtaatcgccagctgtacggcatccccatgcagaccgttgaaatacctgtaaccaagatttggcaacgatccggcgacacgtttctgccagttcatcaaggacaccatcagtcaactctaacgcctgccctattctcgcactcatgcaacagaatcatgggcagataatgctgccaaagctgacgtatgaactcctcatcgcacgcggcaattagaaggccattcaagtgtttgtccaatgtgtttcggcaatgcgacgctccacaatcccgacctgacatcggtgttgcatcaggaactcgagaaacgcctgctccaagctcaaaaagatcgaaaaattgtggttaaagtcggacatcaggcgcttaacgatctcttcgaccttccccatgagtgctagatcaacgggagtgctaccaacgttagcatcgcatgcatcagtcaatgcattgagcaaacgcctgaccgggggagtctaatgaaatacgccaataatcggtctaacagcttccgggaatgtgcttccacttggcttgcagcaacgacagcacaacaaatatttcgtgttgactcagcagccgctgcgcaacgtcaaaggactttcccgcgccgagcacacgtctgctgtagtaacccgggcaacgtctccaataacatctcctgattaccgttgagatgtccgcaagaaacatcttcacactcatgcaggcggtaggcgacctgggaccagtcacgattgcgttcccaacgccccatgaattccaacacgcaaaacgaggcgtattgtttaccgtatttctccctcttcacccctgcctcaacggaaaaatgcttgtcgcctgcatcactggtaatggcggcctgaaaatttgcgccaggtccccaatcttagctaactgtttgtcgaatatccgatacacgcgtacgagcggctctcacagatcacgctcacacagccgaatcaagaacagacgtgcttccgatgccagctcacaagcgcccaaagccttatacactgccacaccaacatgcttaggaccgaccggattacagttggcatccagttcgacttccccagcaatcacccaaagcgccagttcaaacaagccaggagttgcgtatattcacgcgacaacgaagcgagccgcctcagcacgttcaaacaaaaccgtgtcaaagcactcgatgcaacgaacgaaaacattagcgatccccagcaaggccaagacacgcgcctgctccaacaatcggctcacgctcgacaatactagaaaaactggacgtagactttatgcagaaaggctcccccagcgtagcaggcgtcaataaaaccaactaatccagcataccccctatgcatgggaggcggagtcatcaactcatcaaagagtctccagcacggtgcagacgtaaccgccctaagcacatcaatgtggaaagctcctctggcgaggtcacacacaaacgtcgaccacgatgattgacaaacatcaatcgtcctgaaatcgggctaacccaagataattggccactttggatacgaccatcaatgccaataaagtctaaccaggtccccaggggaagctcacggaaataggaaggactcgcagtattcaactcggatgtagccgacatatccggtactgagatgaacgtatcaaaactctgagtctgcgtcgatgtggcaatcactgacgattgcggcgtggccgccgccaacacatgctgcaaatcggcaaacccagcttcagcttcagccagagtcatcccagcaatagagaaagcctccaatatcccagcacgctcctcatacaaccaaggccgttccgggatgcgcccctcgctggcctgacgccactgggccagcaatgcctctcccaatgccaggactgccttaagcgctgggccgttatcatcattaagcaacgcaacctgctgtacatgagcacaccagatgcccctgagaaaatgttcaatctgttgaggcaacacatgccccagaaggcactgcttcagtgcatcagcagcagtctgttgagcctgttgacgtcgctcttcggtgatctcacattccgccacatgacgctgagtattccgcgtcttggccgcatactgctcataatgcatacccaacgtgacttgctgcatctggaacaaggtcacatcatcatcaaattcacggactaccgtctctacagtctcgcgcacctgcatcaataacgcatgctcagctggatcctcccccttgttgccattgcaagcatcgactaacaacatcagtaaccgccataccggatggtgatcagtctctaacaaacaactgtcacgcaatgcaaccttcgcaaccggcaccaacaagtgcccaatccacacacgcgattgtggatataagcaactatcacgcaacatcgcctcgaacagccgtccgaccacatcaagcctatgttcatcctcaggttggatgtatatcccggatggatctgccacaccgagtatggccgccgccttcagaatctgctcacgcaagccgatcgccaatcctagaccagtctcgaccaccgcctgataaccagcctgtgccgaagtctgcaagagagaaagcgctgatagcaattcacacggaaacaatacgcgcgcgccctgcaacaccgtgtgcgatggttgccgcacatcgcgcagctcctgcaacacatggctcaactcagtcgacatctagtgggcatcctgaaatatttgcagcttccacgcccccactccaagcaagcagacgtactcctcaattcaatcggcaaaggcatgccagatgaagtcctactgatctcagaaacgaaaaacttgttcatgtactcctgaacacatccaaagagacggaacaacaagtccgtctatacttgagtagatcgacactcaataagcgagacaatgaacacactttatcctctacacgctttggatgcacgtcgctcagtaccctcacgccagctcagcgagccaggtccagatacggcaacactgcgacggatcctacaatcagcagtacgtgtccccgatcacggaaagcttgtgccatttcggtttctatctattactggtcacgcacgagaagcgctcggtgaatttttggtacaacgcaccctgcaacgcgatccacaggcgccgcagaccgtactggacaaagaacgcgtgcgcttttgccatgcgcctgtagtcattacggtaatcgcacgattacaacccgctcatcaagtacctgaacaagaacaactactgacaacaggctgcgtctgctttgcactgctgcaagccgcgcaagcctacggctttggtgctcaatggctcaccggctggatggcctatgaccgcaccgtcgccgagtatctccatcttggtccacacgagcacatcatcggctttatccatctcggcacaccacgcctagaagtccccgaacgtgagcgtccagatgtggacgcattactccacaactggaagccgtaagtggagtcgcctcatctttgacaaaccacgccacgcatagacttgcctactcaatctgcgcgcacgcacatatccacaatggcagtaccattcagggacatgccctgttaaccaccaatgcacggcacgcaacacgcacgttcaaacacatgcaaacagattccaatatgatgaaggtccggtgcggagcatgattctttggccctctgactttacggccactctgacaagcaaccgctctgatcccgtgctcctcttccccactcatcaagatttcacagcaatgaattcatccaacaacacccctcgcgtggtcttcgaaggaaagtaccagcgcatgatcgtggacggcacttgggaatactctgaacgcgtccaccctggtggcctggctgcaattatcctggcagtcacgccggaagagcggattatcttcgtcgaacaattcagaatccccatacagcaacgcactatcgagatgccggcgggattagtcggcgacattgatgctggagaatcaattgagcaagcagccatccgcgaactagaggaagagaccggttggaccgctgaccatgcgggaatattgctcattggcccagtatcctccggagccagcagcgagcgtattgcttttgtacgcgccactggattacgtaaagtcagctccggaggcggtgacgttgacgaagacatcgttgtacacgaaattccacgtacacaagcagcagcgtggttagtgcaaaagatgcatgccggctttgcgatggacccaaaactatgggcggccctatggctgattgatcacgccctggacggcacccccatcaaataagcaccctactcaatccccacaccaccgcaagaagcaccaataacccaagtcggatacaggaaaagactgcgcatatacctcaaaaattagttttgcgaatgccccagccacatcaaacacctctcaccgcaccgcagccatctccgcctcgatttcatcagctgagcgcggtaacgcgcctgtcagcacacaatgtccatcttccgtaatcaatacatcatcctcggtacgtataccgatgccgcgccacttcgggtggacagccgtatcgtccggaagaacgtataaccctggctcaatcgtaaataccatgccaggctcaagtaatcgagactcaccatcaatgcgatagtcaccaacatcatgcacgtccaaacccaaccaatgcccagtcttgtgacgataaaagcgcttgtaactctgatcagccaaattatcctccaacgtgccatgcaacagaccaagccgcagcagcccctcagtcaatgtctgcaccgcagccaaatgaccagcctcatatggcaaccctggccgcgcctgcgctaatgcaacattataagcagcaccgaccagatcgtatagcgcacgctgggcaggactgaaacgaccgttgacaggaaaagtacgggtaatgtcagcagcataaccgcggtactctgcgccggcatcaatcaacactaaatccccgtcacgactgcattccgcattggcacggtaatgcaatacgcaagcattagcgccagcagcaacaatacttgtatacgccgggcaactgtcagcagcccggaacacacgctcaagctcggcctgcaacacatattcagagacgccaggatgcgcatagcgcaacgcggcaagatgcgcttcgacactgatatcagctgcacactgaagcaacacaatttcatcataagatttgaacaaacgctgctcatgcagcagatgccccagatctataaactcgtgtggagaatccgccgcgtagcgcacctgatcacgcacacgattgacccaaccaatcaaccttagatcaaattcaacatcacgaccgaaatgataatagacctgggacctaccttcgagcagaccgggtaagatttcgtccaaatcatcaatcggatacgcatcgtccataccgtactgctcgattgcgccatcgtacccggcacgtggaccatcccatgcctcgcgctcaggatcgcgttcgcgacagaacagcaggacttgaccatggcaacgccctggcaccagcaccaacaccgcatcgggctcgggaaagccgcataggtaccaaaaatccgaatcctgacggtacggataatgagtatcacggctacgtacccgctcaggcgcagcaggcagcacaacgatgccctggggaccaaccatcttcatcaactgacggcgacgacgcccatattcggcaggggcaatgcctgtatgtttcttcacgattcgattcaattaagaggctgaggagcgcacggaccaatcaaacagtccccatgcaacagcaacactgccacacgcacgaattcttcaatctcttccaatgacccatcctcctcctcttcattcatgtcgaagtcgtcgactgatgcttgggccaacttagctagatcacggaggatctcatcaccttctgcagacagtaccgaacgggagtgagccgccaagccaaagccacccagaaaagcacgacaccactcgaatagagcgtcggcacgtgcagccaaagtcgctccatcatcggccaacagtaattggaaggcgaaatcaggatcctccaattgcgacgcagtggcctgatagagccgttcaagcacactccctttggggggcgcagccacttccgcatcggctagaatcattgccaaccaatcaggcccattgccccctccaccggctaacaaaccggatagactgccatgaagctctggagcagtgacagacaaacccatctgctgactttcttgttgcaccgcaatcacttcaggaagatgcatgggagattccatttaaagcgggcagttaaagatctttcatgatttaagttcatgatactgcagactctgaagacttccagtgtaacaacttttacatggacatacccagacccactcgtttctggaaagctaatcgaacgacaatagagagcactccccacacgtgcttgaccaacactccaaacggcacctagtcttgcacgcatggatcagcctgatgccctcaccgaactccactctctagcagcgcagctagagaggctgatcgaatactgtcaacgtttagctgaggaaaatcacaatttgcgctgccagcagcatcagatgatgctggaacgtcgcgaacttctagcaaaaaatgaacaagcacgctcgcgcgtggaagcaatggttacacgtcttaagaccctggagcagcacacgtgagcgatactgaaccggtcagcatccgcatcctcgaccgtgaatataccgtcggagttggcatcgaagaacgcaagggcttaatcgccgcagcacaactgctcgacgcacacatgcgtgagatccgcggcagcaaccgcatggcatccatagatcgcatcgcagtacttgcagcactcaacttagctcacgagctgcaacaactacatgaaaaacacgcggatcgagagcgtgcattgctgacaacactggatacactgcaacagcgcctgaagaatgcgatggatacatcccattgactgttaacgtcaaaaactatcatttagctcaatgaaaaatagactacaaaaatgcttcacgatggatataatccgtaagcgttctctgctgtgaacgacggcgcgtgcaaacatttagccttgtcccttaatcacgaccaaggggcgcgacgataccgggagtgcaagtctgccttagcagcggaaagcccaatggtatttcaacgcctccacttgaaccacaggttcaaggtcgtttcgcgagcatcgtcatagcggagaatgcaatgcttgcttaccaacaaaattttgtaggtggcgctgctttttagaaaaaaattctctattcatccgttccaaaaacacctgagcatttgaaaagtagttaaatcaagcagaagcattcagcatctgactcaacactattggaacacttatccctatcgtctcgcccccccccccccaaagcctccaaagtcagtcaagccatctgcgatttaaacccaatcagacagttgttgtttgctccaaacatccaaaccgatgactgacaaccgctccatcctgcgtcaacacatgcgcgcacgccgacatgcaatccataaacacgcacgtctggccgctgctgtaacactggcagaacacctactgacactcccattcgcaccccaaaccggcgcagtagccggttactgggcaatggatggagagatccccttgcaccgctggcaaaccagactccctgcacaggtacgctattgcttgccaatactggcaggtaaaacattgcgctttgcaccgtggcatcccggacaacccctgaagcaaaaccgctacggcatccccgagccagacgtcacactggatgaaaccctaactccagaatcgatgacactggtagtcacaccgctggtcggcttcgatactcaaggacaccgcctcggaatgggcggtggttggtatgatcgcagcttcgcattccgcaatcgccagtcaccccctccctggcttgtcggtgttggtttctcagtacagcaggtcagcacactaccaactgaagcctgggacatctgcgtcgatgcaatctgcactgaactcaccacgctcctactcccggccactgtgtccacatgagcacacgtcactactggttaatgaaatccgaaccagatgctttctcaattgatgatctacagcgggtaggtaccgaaccatggaacggcatacgcaattaccaagcacgcaacttcatccgcgacaaaatacacatcggcgacagcgtgttgttctaccattccaactgcaagcccccggggatcgtcggcctcgccaaaatagcaagcgcagcctatccggacgaaagccaattcgacccaaactccgactattacgaccccaaagccaagcgcgagcagccccgctggtacttggtggacatcgcattcgagcgcaaactggcacgcaccatcacacttgaacatatcaaacaacatgccgaagccctcggtgaaggctttccactgaccacacgcggcaaccggctttccgtattcccggtcactacgacccaatggaaactgctactgtcactagagtgaactcaacacagccagccaatgcctgtgcgccttcccacatcccaatcatcattaataaccccatgagcgaagcaaaacggcgcgccgccgaaaaggccatcgaatacgtcgagaacgatatgattatcggcgtcggcaccggctcaacagtcgcctacttcatcgacgcactaggacgtacccccaaacgcatcaaaggtgcagtatccagctccgaacagagcacagcacatttaaaacaacacgggatcgaggtcctggaactcaatcatactggcacactccccctctatgtagacggtgcagacgagtgcgacccgtacaaacgccttatcaaaggaggcggcgcatcattaacacgcgagaagatcatcgctgaagcaagcaaacaattcatttgtatcatcgacccaaacaaacaggtagcaacactaggcaagctccccctacccatcgaagtgatcccaatggcacgcagcttggttgcaaggcaaatcatggcacgtaccgacggtcaaccagtatggcgtgagggggtgattaccgataacggcaacgttatcctggatgtacatcacttacgcatcaccgacccggtaaagctagagcaagaactcaatcaaatcccaggggtcgtctgcgtcggcctgttcgcccgtcgctgtgcagacctagttatcatcggcagcgaaccgccgcacatactctgaccctcccctccatcgtctaaactgcaagcgatacgacggcacttcaaaaacaccaaccttaatgagagtcgcacgacttaaacactatccccatatcctgccccatcgtacttagtaaaaaattctgaaatgcagaagcgatctatagcagtgaaaagtacacactgcgttcaatgtcaaatgcctgcaaagcaaaccactaattaagtgaaacggattgctctctcaggatctaatacaccaatccaccccagaaacagattcataccccgaaatacattcacaatcattgcaacccgcgattaacacaccaccattgcatcgtattcaggcatacggcatgcctaccaccctcactgcaccagaaatagaacactgcctacatattcctcttccacctggaaaaaatgaaatgagggagtactgcatataaatcaacattgcacagccgctcaaaatgcttcattgccataacgcacctccacaccgagcattgaacacaatgtcagcatggcctcatcatcacggctcagcgcaatccaaccagcataactattgccatctgtatcccaattccacagcgtataaccatgctcacgtaagcaatcataagcaacggccatcaattgagagacgtcggtaacagtaaaaaaatcgtcgtcatctaaatcgcctccccaatcaatacgcaaattccaacgcgtgaccaattcatccaccgcgtctacgaaagatttaatgtccttcccctccgtataaaatcctgaacgccagtcgatcacatccttcaatgcccaaagccaaggctgaacacaatcactgtccagatcgagatctgccactctgtcccgccacgcattgaattgaccgaagacagcatcccgatccccaggattgatcaacaccagcaaattccaaaccccaacggaatcatcatcggtatcgtcaaaatcctgaatcaggctatcctcatcctcataatcgacactgttatcaggcatcagcgtactccacaacagagacattgcagcctgtccaccgcaacgacagacgcaacaaataaaacgatcttttgctttcttccgcaccattgaaagcagtcatttaacctgccaccaacgatgcaaaaatggcaagcacaagacacatcaacaccgatcaatactcgtcgcacgtgacacctcaacgacactaaagcaggcaatcgcagcgtacatttcaacagcactaaacacgacaccatcaaagaatgtgtgttatcgataagacatctacacccattgcacccaatgacaccgcaactcaaacatcaaactccgtgctactacctcgcaacaacacagatgcattccatccaacatagccccctgttcaactaactgcgcctgcgtgcctcaatcaaatccaaattacgcaccatccgttgcaacaactcatcggaaatattgtgctcacgtgccaacctaaacaactcatcacgctcagcggccaaacccacctgacgaaagcgccgtacaacctgctcgaataccttggtttcttgtggatcgacattggccagatcaacggccccaagcttgcgttgatacaattggctgacctgatgagccgcctcattgtagcgctcagcattagcactatcctcaaccaacctctgacgtagccgctccactgcctcaagtgcagcctgagccgatactctacgcgcgaaatcctcttccttgtcataactactcttctcgggaagctccaaaccacgcagcaaatacggtaaagccacactcgccagtaacagcgaaaccagaatgactgaggctgccaaaaagattaccagctgccgtgccggcaacggcgtaccatccggcatcaacaacggcaatgtcagcaccccggccaaagtaaccgcaccacgcaccccagacaacgacatcgccaccacaatctgccacggcggactgatacgctgcttgccgcaacacaccgctttgaacaaattccactgcaatgacaaccacacccataaaaaacgcaacaacatcaatccggcgctaatcacagcaacgtcaaccagtaaccatcccacattcatatgcccagcttgctgtgcactgtgaacgagatcatcaaggatcccaggcaactgctcgccgagcagcacgaaaataatgccattgaaagtaaactgcaccgtttcccacaccgcccagcgctgtacccgtatcgtcgccggagcattcccactcaactcgacataactcatcgtgattccagcagcaactgccgccaaaattcccgaagcctgcatactctcagccaacagataagcagcaaaaggagtcaacaaattgaccagaatcgccgccgccggctccccgccaaaatgacgccagacccacctctgtactcgactgagcacataggttgtcgtcatacccaaactcaaaccgaccacaagcacccaaacaaaagttagcgaagcagtggccaacgaaaaatgccccgtcaacaccgccgcaattgcaaattgaaaacagaccagcccagtcgcatcattaagcagagactcgccttccaaaatatgcatcatgcgcttagggatgcgaacccttgaagtaatcgaagacagggccacaggatcggtaggcgacagaatggccgctagcgcaaaagccagcgccagcggcattgttggaatcatccaatgaatcagaaaaccgatacccaatacagtaaaaaccaccaatcccagcgctaactccagaatcacatttttatcgcggaataaaccttgcttaggaatgcgccaaccatccaaaaacagtagcggcggtaaaaacaataagaaaaacacctcaggctgtaactcataaccaccatcaaagacaccagagatcaccgcaccaagcgcaatctgcaacaaaggcaacggcattgaaaatggaataatacgtactaggtaaccactggctgccacgactagcaacatcgcaagaacgatttgaatcgaatgcatgcaagaaaccatgaattgtgaaaaaaatgtcacagccataccacgcatagcagccgccaacattagcgattctgctatccccaatcattcagatgacaccatattcatctttctgattgaaccactgcaccgaaaataatcaccacgactgatatcactccattctcattcaacgcactgaagatataacctcagcaaccacctccatcatgaagcatctttatgaaaacatcagtgatgtctcgctgaacctcgccctctacatcactacagagactctacatacaccgccatcactctatgtgactcacatcaattgatgcatatacctgtctcaggtaagcaatcacactacatttatgctgatcaataggcattcaacacgccaccttgccccttgcactgatcacatcttcgaccagcccaccgctgaagcagcccacgacatgatggctccccaatgtacagaaggcgcgcatgtggagaagttcatgacatacccattccccatccctgcttacaagcttgggacgttcacgatgactcacaataggatatgtgttgcccaacattaccctgacccataccaaacgaacaacgaggccagattcatcaccaaacgcacgccagatgcaaggtacctgaaccacgactgacagaacaaatctgctcacttcccactacacccagacaaagaaacaccccattgcgcatcaatggttggcacccagtatgaccactattgttcagacagctattcaacaagaaacgggacagcaaacaatccaataagaggcacacagtcaggattccggtcaatccatcgtcccgcctgaaacaggctagatctacaacgtaaagagcgcccgccttatctctatttgtagcgttgctgcaggcgggccactcttgatacggtcactcttatgagtaaaaggcttgatccactcaagcccaataacgggcttactgtgttggctgcatcagcggctgaatgtgagcggagtttggagcgtttgatccactttccgatgatgctggataaatgattttccaaagaactgcgcgttggccttttgcatctgttgaagaaaatcctacggcaatggtgccatcagcggagagcgcctcaatcccggataatcctgcattatcacttttaaatgttcccaaatccgttttggtttcccaattctcccctgaccaaatgactgcatgaatggttttagagtcggtctcggaatatccggcggcgatcttcccattagccgaaagtgcgaccactttagagttacctaaattatcgcttcttagtgatcctaagcgcgtttttgtttcccagttctcgcctgaccagatgactgcttgttggtaaattgctgtgataacaggttcaatttcagattgccctgctgcaattttcccatcgtcagaaagtgcattaatcgaagtcttccctaagttatcgcttcttaaagatcctggatctatttttaccccccaattgtcgcctgaccagatgactgcacgttgcgatgttattgatgaacgatcagaatcattaatcacggtttttttaatatcagagtcagcatttccagcagcgatttttccatctgcagaaagcgagctaataacagaaatacctgaattatcacttcttagcgtcccaagatcagtttttgttgcccaattattacctgaccagatagttgcacgtttgctgaatttttctgattgagaagatccagcggcaactttcccatcagcagagagtgtattaatcattgaaatacctgtgtcatctttgcttagcgttccaagatcagtttttttcccccaattatcacctgaccagatagttgcttgaatgtatgattcctgtcgtttatgcaataacatagatttcaataaactcttattgaatttaacaccacttaatgaatatccagcagctattttcccgtcggtagagaatgccaaaatttgagacaatcctgaatcacccaacatatttcctttgacttttgtttttttgtcccagttttcccctgagataattgtcgagtttaattccaaagggttaacgtaaacaccatccggaacatcataattcaacgtcaccgttttcccatctcgagagactgtcctagaaatgacatctgaagtctcccacgacagaatccttttttctgatacgtatggctgagttgcataaacgacaccggcacttcctatcaataaaacggagataagtgttgccaatattattttttataaatttttcttttcataaaacatccttgagcattgtgaactttccagtcagtgatcctgaaaaataactaagatgtatatgtaatcatcctgagactaatatttcataataatccaatgttatctaactgcatgcttcatgattactaagcggcgttgcaataccattactccacgcattcctctccacagatcctacgcacgatgccccccaactttctgttctacgacttagaaaccttcggtcaggacccccgtcgtacacgcatcgcacagtttgccgcagtacggacggacaccgaattaaacgtcatcgaagaaccaattagtttcctcgtcaaacccgccgacgacctgcttccttcacccgatgccacactcatcaccggaattaccccgcaacacgcacaacgtgaaggcatcaatgaagcagcagccttcacgcacattgcaatgcagatgacacggccacacacctgctcgctcggctacaacaccctacgtttcgacgacgaattcattcgctacgggctattccgtcacttctacgacccatacgaacgcgagtggcgcaacggcaattcacggtgggacctgctggacatgctgcgactcatgcacgcactacgcccagaaggcatccactggccaacacgcgaagacggtgccccctcattcaaactcgaacacctagcccttgcgaaccatgcacgcgaaggcgcagcacacgaagcattatcagatgtctatgccaccatcagcatggcgcgtaaattccgcaccgcacaaccgcgcctctggaattacgcactgcaactgcgcgacaaacgcttttgcgccaccctgctcgacatcacctcaatacaaccagtactgcatatctcacagcgctatccggccacacaacactgcgccgccgccgtgctgccactgaccacacacccacacatcaacaaccgcatcattgttttcgacttgaacggcgacatagacacactgctgcgcctgtctgcagaagacatcgccgaccgcctgtataccccgaccgtggatttacccgaaggcgagcaacgtatcccactgaaagaagtccacctcaacaaagtaccggccctgatcgcctggaacaacctgcgtgcatcggacttcacacgccttggcttggacgctgacatgctagaaaccaaagcggcacaactgcgcgcatgcggaccggatttggccgaaaaagtccgccacgtcttcagccatacctacaacaccgccaacgacgctgatgcttcactgtacgacggcttcctcaccgaagaagaccgccgccgcctgccacaactacgcgcctcccctcctgacaccttggcaacgttcgaacagcaccttcgcgatccacgtctcatcgaactgctgttccgctaccgcgcacgtaattttccagaaaccctctcttgcgacgaacagacacgctgggacacctatcggcgccaccgcctgaccaccgacgccggcctctcagaactcaccttagaccaataccacgcccaaatcgcggagttacggatgacgcactccgaagatgtcgccaaacagctcctattggaccaacttgcctcttggggctccgaactatcctgcaccttatgacgacatacttcaccgacaacagctttaagtacttccaggaactggcgcaccacaatgacaagatgtggtttgccgcacacaaaccgcagtacatcgaacatgtacagacaccctttctacgtctcatcactgacttacaaccctgcctggctgacatcagcgaacactaccgcgccgatccacgtccccaaggtggttccctattccgtatctatcgtgatgcacgcttctccaaggacaagtcgccatacaaaacctggcaaggtgcacgcctgttccatgcccgtaggcgcgaagtgccaaccccctccttttacatacaactgcaaccggacgaaagcttcgtcggtggcggaatatggcaaccagcatcagacacacaacgccgtatccgccaattcatctttgacaatcccgccagttggcacacctctgcacacgacccccaacgacgccgtacatttaccctgtacgaagacgaaaaactcatccgggcaccacgcggcttccccagcgatttcacctttctagatgacctcaagcaccgcagctgggtactttggcgaccgctggaaaacaccctcatgaccggaccgcgcctgcgccgcaccttggaaacaagcttgcacctactggcaccattcatagactacctctgcgccgcactggaccttgaattctgagatcaaaagaaaccggcctacttcgccatccagcctggcacagaccagctcgccgtaaaggcacctcacaccagcccccttcggaccatcagtgacatccctctatcactgtccacaaccatcactgccccatgccacataaccgctactatcaaggcccattaagcgaccacttcgacggcctacgcttcttcaatccaggccaacccaacaccgacaaaccattcagcgacctgttgcgctggcgctgggagagtcgccacctgcccccttggcgcgacgtaccacccacccacgtcgctacccccatcgcacgcagccagcaccccatcatcaccatgattggccactccagcgtgctgatacaaattgcaggactcaacctactcgttgacccggtatggtccgaacgggtcagcccactctcctggttgggtccgcgacgttggaactcccctggtatcgacttcaacgcattaccgcccatcgattatgtactcatcacccacaaccactacgatcatctggacctgaccaccctggcacgcctccagatagcccatgccccccaagtggtgaccccactgggcaacgatgccatcatccgcaagcgcgtccctgacctgcatatacacacccttgattggtgggattcaatacaactgacaaacgaacccaccaaaatcagcgtcgtccccgcctaccactggtcggcacgcggcttacgagacaggtgcatggcactgtggggcggcttccacctacacacaccccaagggagcctctacattgctggcgacaccgcctatgggaatggcagcatcttccacgcaatcgcgcaacgctgcggtgctccagatctggccatcctgcctatcggcgcctatgcgccacgctggttcatgcacaaccaacacatcgatgccgtggaagccgtgcagattatgtgcgacgtaggcgcacaccaagccttgggagtgcattggggcaccttccgcctgaccgacgaagccgtagaagaaccacctaccctcttagctcaagccctacaagccaaaggcattcctgcaacccgcttcattgcgatgacacccggtcaaagaaatcggtggaaagcttccgaacggtaacaatgcagttgattgggataatgctgccaaatgttggtatgcaaatcctggagctgatcttgataagttgaagccgtggattgctacggaggttgtgagtcggcaagttccggcactttctccagaaaaagaatttgcagagacgttacgaagcatgggatgcctcgtgagtggtgaacatcccatcatggacgctaagaaacaccgtattgaggtcgaaggagacaaaaagggggaaaaggctggtttttatgtcgcttacctcgacggccacccatccggctatatcaagaacaaccgtactggcatcgaattgaagtggaaaagcaaagggtactcgctcgatccagagcaaaaggccgcaatgcaagcggaggcagcggcaaaattggctgcacgcgcagagcagcagcaacaagaacaagaggctgtcgcgcaacgtgtcgtaaagcagatggatgatcttgtgactgtgattgagccgacgccctatctaaaagctaaaggcatcacgccacaggctggtatatacactgacagtgatggccagaagacctacattccagctatcgattcggatggtaagcaatggacgatgcaatacatccaagaggacggtacaaagcgatttgcaaaaggggggcgtaaggagggttgttttcacccaataggtggtcttgctgctatcgcagcagcgcccgtgatcgtcattggcgagggctatgccactgtggcgcaagtgtctcaggcattgggttatgggaccgttgccgcatttgatgctggcaacctggaaggtgttgccaaagcattgcacaagactttcccagacaagcctattctgattgccggtgacgatgatcagtctttacctaacaacccaggaaagaccaaggctcaagaggcagcgcgtgctgtagacggtaccgcgttcttcccaatcttcgcgccaggtgaacaggctgataatccgaaaggcttcaccgatttcaatgatcttgccactaagagcgcgctcggtatcgaagcggttgaacggcaggtacatgcggctgttagcaaggctatcgataatcatcagaaacgtgttcagcagcagacccaacaacaagggcaacacgaacagaagcaggaacgtcgacggcttcgcgttcgctagcctgtgtttgattgcgatgagcttactgatgaagcagaaaccttattattcctgaaggagttagtgatggaaatttgtaatagcattgatctgatagcggaggtcacgtaatgaccgcatttcactttataaagatcaatgacaccgacggcgaacatattatcactcgtgataaatatctggtgcgaagactttcctggaaaaccgtgccattatctcattcactgtcgagttcacgagcattgacatcagcgtcgatgcctgctgtaaagtaatctcgaatatcacgtatgttttccggactataccgtccatcttgattagcaatattaatatatgcttcgatgattccagaaaaaccaagcatttttattttaatatcttcggagtgtactggattacaccagtaatcagagttagtaaacatgaaatgacggcggcaagccattggtcgtatcgaatagatgttgcattgcccatttttagatagaaatgggcaacgtttaccgtgaccgttctgaaaagtagtagggagtggtagtggcgcttggccgagtgagatggcaatcagttcagcttcaattggaagcaggtctaccttgtaatgacaacaggcgctacagccgtagcgacatgccgtaaaagggcgaattgccgtgaagatgggatcgcttaacttatagagtgttaagagcttttctatcggtgtgccatgagttccagcaataatatcaggtaatgcagcttcttcatttttaattttattgcttagcttcttgttcaaacgctgaatattcttacagacattcttgcgtgcaactttgatattgcgttctgatatttttgtcatgagctattctttcaatttacacaaaaattttaaactttcaattattcgttactcttgggttcgcaaataggggtagaacaagcagtcgtcttaccaggcgccaccttgggataaaacacgttaaggattaccggctgccggaatccagcgataaagcgtaggaatggacacaccgaggtttctggccacgtccctgggagccatgccgctggccagcagtttcttggccgattcgactttactctcggtcatcttgagtttgcgaccacccttacggccaagtttgcgggcgacttccagccctgcgcgggtgcgttctaccatcagttcacgctccatttcggcgagactggccatgacgtgaaagaagaagcggcctgacggcgtgccggtgtcaatagcgtcggtcaggcttttgaactgaacaccttgcttgtgcagatcgccgactaaatcaactaggtttttaacgctacgtcccaaacgatccagcttccagactacgagagtatcgccttcacgtagcatttccagcgtttttgtgagtcctggccgctctttgttactgccactgatcttgtcgttaaacagcttctgacagccagctttggttaaagcgtcgatctgaaggtcaaggttttggtcttgtgttgagacacgggcataacctataagcatggcctacttctggctctcgatcccagcagcaatctgccgtcgatggcagcaagttcaagcgcaactgcaaggagacgatcccgatagcttccccaaagtgccaacaattttgcttccttggccatgtcgccaagtgcatcgccaaactctcgatagtcctcgcaaaagaaatcgggccgattcatatcttcattccctaggctgcaagggtaataagcgcaagcgcgtgcggttcggatcgacagtgaccaatgcgccttcttcaagctcggcggccatttgtcgtaaggcaatgacgatctgcttaccaatcacgtctgggctgatatcctcagcgcgaatctgcaccacgctaggcttctcaccatgagtggcagcaaggatcgcaccaaagtccagatcatgagtgagcaccatgtagttgtttgcactggcataggccatgatttccaagtcttgcgcgttgtaggcacccaacgttgaccagtgtgccgcctcgatccctgcatcagccagcacatcgacccagcgcggcgacaggttcatatcaacaagcagtttcatacgatggccagcatgatctcccgttcatctgcgcgccatgcggcatagcgaagcgcctgcatgatgtcgtcgtgctccaagtaggggaaatcggtcaatatctcatcgacgctgtgacctgagccgatctggccaaccaccatgccgaccgtgatgcgcattccacgaatgcacgccttgcctcccatgactccagggtgttgggtgatgcgattgaattgctccatattgcggctcattatcgaaacttgtcgcaatggtgactgattgagaatcacgtatcaagaactatttgtgagaatggaagtgccttgattccacatgccatgccggttgtcttggcgtgcttgtcacaaacgtgcgtttttgagaataaggtaggtgcataggactgttgcagatatgtcgctaaattcatccgcacatatgttaaaatgtggggatgtgtaattgtgggggctatcccatgagccgcttaaccatcgacatgacagaccagcagcatcaaagcctgaaagcactggctgccttgcagggcaagaccatcaagcaatacgcgctggaaaggctatttaccggcgatgctgatgccaatcaggcatggacggagctgaaaaccctgctcaacacccgcatccacgaaggacttgctggtcatgtgtctaccaagaacatcaacgaaattcttgacgaagaactgaccgaggacggggcttgacgggttacgttctcactgaggcagcagaatctgacctgcgcggaatcgtccgctacacccgtaagcaatggggcaacgcgcaggtgcgccactacatcgccacgttggaacggggtatcgccagcctcgccgagggccggggtgcgttcaacgacatgagttcgctttttccggctttacggatggggcgttacgaacatcattacgtcttctgtctgccgcgtgaggaagcgcctgctctgatcgtggctatttttcatgagcgcatggatctgatgacacgactggctgaccggctcaaatgatcgaaatggcggctggtaacatgactgcttgttctacccctagtaagccggttatggcagctaatacgacaccaagggtaaaggttgagatgccaaggtcttccgtcgtgaatacctcaatgcccgttgggcattacaatgcagcagcagcagatgctcttgaggcagtatttggacatcatccggcaatacatcgaacagcagcaaacaccaggtgagtcggaaaacagtgccttatatccttgccctgaaggacggggttttacggcgcacctgataaaggagaaaatgataatgtacgcattacaacggcgtacagggcgcggaagtcctcgcgtttcatcaagttccaccaaggctaaaaatacacagacactactgctttcacagctatttgatcactactccaatgaatggcacctgattcttttgggtatccaacgttgccagttggcgccgggatacgcttagccggacaacaggcgcaatgccatgatcggtaacacgtggcaaaatcgtgcagtgaaagttggggaaccagaagccgcgtgcgatgcgtggattccgtagcagtgctcgaaactgtgcatcgccgaaagaaaaatcagccagctgatcatccatccagtttgaactgtagactcgatgacgaccaagtagccagtgatggtagacttcgccacgcgagcagcgcggtttccagtattcaaaccaatcccgatctgtgctcaccatgttgagatcaaggcgctgacgcgcatcacgaactatacatgctatatcaaagagatcattctcgaagatactgtctagtgggaccgacattgagacgttgccgagacaatttccaatgaccaccggacgcaggccgagtaacggtcgcaggttgattggaaaatagagttggatttcagcaggatctcgctgctcctttggcgcggcaacatgcaatttcaacaaggctgcattgattagatcattgcgcgaaagcgtcgtgccgcgattggcggcttcatattgcattgatcgcagaatagctccatcaaggaacagacagaccggagccgagtcgaaagcattcgacagaaagtagcgtgacaggccgagtgccgccttggtgcgtgagatgctgacgattccatggcggccttcgcgaccaggcggagttccagttttccaccgtgattctggcaaggtgttccatatgtgtccgcgatcgaacagcggagtttccacgtccgtcgcgccgctatagcagcgactgactgcgtgaaggaatgcataaattccgtgcaaatcgctgagtgcatggttccagaccacgctgaaaatgctggcatccgcgaattgacagagacgaaaatgcaagagtgcgcgtcggttcgccacgagatcgggcttttcggggatcagcgtggcgagaaaacgtgcgtcataaagcgtcgtcacggcagcgttggcgagggcttgaggatacgattccatttcgaacacgaccggtcgtaccccgcctcgttcatggggatgcgcagcggagtatcggccagtgagttgcggaccgtttggtgcttcgacaaaggtcccgtggaagaatgggtagtggtcaaggacggcgcgaagtgcacccaacaggtgtttttcattgatcctggagctccataacatcgagaaactcgcatgcatgcgttgcatggccgcgtcctctgcggctagtgcataacgaaactcaatgggttgtcggggccaaagtatttgccgtcgtttcatcctagatatgaagcacttgatacagtgggcgtgctaggcgttcatacgcgaaggcgacgaggtgccacgagaagcggatgcgcctgggaaggtgcgacacaaaataccactcatgctcggctacaggcacggcatcgcgtttggacttgaatcgccccgaaccggagctcaggttaagcggcagcgaacgctcggcggcgcggcgcatcagcaggctgacacccattcggtacaggcccaagcgtttggatagctcgggttgatggccgacgacggaaccgatcatttcttcatcggtatcgaagctacaaacaaaatagttgacggccccctccccatcaatggtatgaacatcgacaagagcgcttcccgcaatggtatcaaaccaatgctggctaagttgcgggttgtaacgcgaatatttttccagtatagctgctcgtagagcgatttgagttgggccatctggggtgagtcgagcaccgccgacatgcgcacggactcgcgcgaagcgtcgagacggcgcctgtcttggcgaaactcacgtgacggtttaatgctccgtgcatgatcgtgagaccagacgtagacgttacgattgaacaatgcatgccacccaaggggcggtgaagtcgagacaaattgagctgtataatcagcgcgcacgcctctgaccacgatggcatgattggggaaatgccgcagcagagtggtcttgagtctatcgagttgcgcgggagaaagcgcgtagcgcggtccggtggcgacgagccaatgattgacatagaccactcgatcgagatcccttcggcgaacgaacgtcgcgaacagcgcgacgatgccatgcaggggccagcgccagcggcgctgcgggagtcggcgaacgaaatcaagtgagtaaacgatgtaattgatgtatggtgacgtgagatagcattcgctatcgtttccatcgttgacaacgagtggtaatgcttggccatcgacttctgccagcatgacatggtgatctgtgttggtaatcagagcgctcgagcgcttgccgaagtagggtcgaactagtgcttcggccaacggaccgtgacgaagctcgcgccacggaatggctacaggtgattcggcttcatagaggcgaacctcggtggcagtctctgtgaccatgcggtttactgtcaccccttaccatccgaaggtacgcacatggcggtcggcccggttcctgtcggaaacgtgtgcgagcacagcgcgggatcacgcattgtcggctgttcatcacgaaagggattgcggatagctggcggctgtgggcgtagaagcgtctgcgtcaacacgcgaatcagcgtgcgttgcaccggcgattgatgccatacccaagcatcaagtgtgataggacgcccaccgacgctcatcttcgggccgggggtggtaacgcccagattgaccgcctggcagcggtgttcgatgccgtaacgaactacttcgtacaacagtcggaaatataccccttcgccgacggcggcctcacgggtgaaaccggtacatgaatagcgaagcatcggaccatccatgaacagcagtgcgaaaccggcaatgctccgatcaggacgacgtagtagcagtatccgtgactcggtcagtgagctggctccggagaaaaatgcttgcgtgaggcgcacacgatggtattttccggaacgctcataaatgttcctccaaaggtgcaacagatcccccgacagcgagtcaaactggtcgaggatctcgaccgagagctgagcgctattcttcatgcaattcttgtagtggccccggtaacgggtgcgaagcgctgcaaggtattcatcgaaggaggtgaacggcagtgagatcaggtaggacggcggcagcggaaacgggaaaaagcctttggctctgagtgcatcaaccgtctccggctcggcggcgctctcaatgtcgcggatcacgacgaaggcatatcgctcgcggcaagccttctcaatggtccaggaagcgagagcgtggatacttcttccggcgggcagagggctacgcagcggaaacccaagagctgccgggtttccgatttcaagcgtgcgatggcgaagcaggttcgggaagaaacgacgcaacgcacgcgcaccattctgcaagcgcaatgaccctagatctgcgctgtcgatagtgcattgataactggcgaagatacccacaggattgccgttgccctcgtgcaccgcatgaggggtcaacgaatagtccgaaatgtcgatctgttgcacgcaacgtaagaagcggcaggtcaggccgagatgtccttccgggagccagttgtcccattcttcttcggtgagcgtgagtggcacgggatcaaactgcaaggtggcggccatgaatgactccgaaaacaatctatgttggttcatcgacatcggaaacgtcgatacgcgcggccacggcgagcgctgcggcgcttgcaacggcttccaggccatgtcgaaccccaagacgatcagtcggaggcttgttctggctcagcttatggatgccatacaactgggtgatgcgcagacgaagaccgaccagtgcgtcgacagcctgcctcaaggcatccgtcggcaaatcgtccagccgccacggttcctggcgatcacgctccataatgtccgacagggcggcgagatgggtgcgcagccaatgcggatcccgtgtgcgcatcaattcaccatgggcgtgcacggcaacgtaattccacgtgggaaccaccgccgggtgtgttgccttcgatgggtaccacgagggagagatataatgctggggaccgtggaatatcgccagcactgggcagcattcgtctccggtcgcgattgggttaactgccgagatgtgtccttccagccagatctcgccgcctggttcgacctcgtttaacaggagcggcacatggcacgccaccggtagcataccgactgcaatcacgagcgtcgcgaacggttgctcgtgaatgagtgcctgcaacgacgtggggtggttttcgacgaaaacggaaggtgggtaagacatggacaggtcagcaacgatatatggttttctccagcccaccgatcacgagccgaacatgcgagaccctttcttcccgaaactcgtactgcaattggcttggcaacccaaggccgacgaggctcagtaaatcctccgcgtcggggacggccttcagcaggggctgctggttgataaagacgcaaagctcgctgtctacgagacgtacgcatccaggtagcggcacgggcagtggttggtccagcacgcctggaagatgaaaaccctgcggtaggtcgaagtcgaattggaaccggcgcagcttggctggattaatcggatattccggggcggcacgccgggactcgagcgccgacggcaggcgctcctccggaaatagtttgcccagtgcgtcgtccaccatcacatccagtaccaagtggacgcgctcgacatcgctctcgttgacgccccagtgaggacgtgagaaatcgccataccacagctcgccggctttccagtcacagcgcgattcgtcaatgtagaagtgaacgcgctcatctgtgatgacaggaatatgcaggcgggcgatgcgctgggacaggaacgtatcctggtgccgacggatttcccctccaggctgcaagcacattaggcgtaccagccgtagcgatagtccgagatcggcaagtacagttcgtattgtcggcgcttcatctaggagatcgacgtcctttgcagtgctcgagaacaggcagatcgccgaccagccaacatgattctcgctagggtaaccagcgggacggctgcccagttgtttacaaagctggtgatagtcgtgcgccagtagggatgcgtcaaaatgcttgttcaatttttccgtctgcatgctcaggttagactccttggaactccaactttctggaacacgtcaatgtgccagagttgtgtggtctcagcagccaacagagtcgcaaatcgttctcgaatctgctcatagccccgattcttcgggcggaccacgcgaaggtgaccgcgcatgacgacatgagcacgcggttccagccctgaccgtagatgatcgagcaccgattccgccgtgcctgctggcagaaaggacggcacatccgataacgacacgaatccgacgttgcccagctcgcgcacgcattcaatgatatcgccacgaacgatgcgcaccgaggttcccctgcgtaaggcttgggcagcggattcataaacgccctcgtcacactcaatggggaatccttcttggtactgcaagcgtcccaagaacaccatctgcaagaaaaagctagttttggccagcgtgttctggaacaggcgtgcaaacaaatcgcgataaatcccgtaggtgcttccctgaatgttcttgcgtggaaactcgcccttgtagagcagtgaattcagaacggtcgaattgccaagcaatgccagcaccaatcgccagcgccattggggaaattttctggcaaggtagtcgcgttgcgcaccaagatcaccatgggcgaagagtgcttggccatttcgaccagtaacacgacgattgacgctggcgagcgtttgcaacgtgcgttcgaagcgcccgagataaatcggcgattcgccgcgagctacggcttcccatacgggcagcaaatgagcacgatgctcctccgacaggggcaggtcccgcagcatgcgttgacgctcgtcgaccgcaagcgcaacgtatcccatcaggccgaggaattcatggcggtgcaacgctcgtaacgcggccacgcgcaaagctgtcatagccagttgtgcgtcgttgatatcgacacagatcacttcgtccggtgcacgtgcgataaggggcagcacgcggcctccgcttccagcaacggccaccacgcgtttaataccctcggcgagcatgccgtattcgaccgaactgtcttcatctccgagcgagtagttgagatggtcgaagtacacgcgtgtcatgaacttaagattccagcgtcagcaggaatgtcgcccgaccagcacgctccgcgatcagacggtgatgttcgacgtaaacctcgtccatcatctttccggttagccgtaagctggtttccataacctcggcaatggcctgccagtcggcgggtacacggcacttgcgtgtgatcatgtcgttcacgatacgcgagtgttcctcatcaatgtcggcatgggagacaaagaaagtcatctggttcgtcgataactgcaatttttccttgaccttggccatcatcggcagtacgtattcgtaacaggcttcggcccagaagctgtaacccaagcgctgcaaggggttaccttggtaggcaatccagtataggtaggccgtcaacgtcgtggtcgccggaagagggtcggggatttctaagtcgatagcaccgagcccgagatttttcaagtcatgtagtgccatcatctcatggccaacttcttcagcggcatgcttgaagcagaacttctgatagaggtgatcgtcaccgtagcggactccgacgagcgcttggttgcgggcattgtgcttggtatagtgataagtctctaagagatagagcgcgtacagagatttggttacttcgccgtcttggatggcacgcagaaaagacgaaattctgaagagatcacgccaaacatcatccagatgccgcttcaagccttcgagtgaggtaatgggtggagtgtcagccgtgtgaacaggttttactgtggcttcgatgaacatgcaagactccttatgagggaatagggtcatgacgggtggctgtctggcgtgttcgggccaacgcagcttccgacgcgcgggttgcacctaagatcagcgcctgccaacggctcgacaacaaggcgtagcgctggttgtttcgtgtcgggatgcagaaataatccggccagaccgtggatagtccgtagcgttcgaagatcatacgcgtggcgggacggcacagggcaacgataccttcgtatccgtgactcatcgcccaagcacaggcttcgacaattagcagcatgctggtggaagtctggcattcgcagtttgccatgacaaaccgactgacttcgacatgcaacgagaagtccggccaagtctttcccgtatgcgccaagagccgttcgaattcaaacggtgccgggcataaacgcaacacgcccacgatcacgtcattgcgcttcgcgacaaagtaagcgcaacgttcgtgaatggccaactctcgttcgagtgcttgttgcgcttcgccaagaaggtaggcctgtttacgttgaaactgttcgttctgaaacccgcgtatcaagagcacagcttccgtactcattgtatccaatagcagcggcccctgaattgtcgctgctggtatgttgaggtcgtgcttccgcaacgatcggcgtaacatcaacagtggcgactgttctaaaatggatgcttgaggtgttatgaaatatgtatctaatccttgcattctcaattatgaccttattttatcaggtgcgccgtaaaaccccgttcttccgggcggggatataaggcgctgttttccgactcacctggtgtttgctgctgttcgatgtattgccgcatgatcgaaatcggcgcaccaccgtaactacttgcatctcactgttcatcttttgagaaaatcatggcttccgtatcactgcgcctgcctgatgaagtcacacaacgacttgagaacttggccgcgccccatgatcgaggcgcttgcctcgatcaacttgctgtccctctttcggggcacgggtggcttggccatgacgattccttatcggtctgtggtgggcggggacgggagctgcggagcagttgcaggcccaccgccgcggctggcggcgtaggccccttcgatgatggtttcgacgcggaccaggcgctcgcgaagcccctggttctccctgcgcaactcgcgcaactccgtgctgaggtcctgcatcttgtcggcgatgcctacgacggcgcgcagggcatcccaaacttccttcatggcactcatcaagcagccttcgccggcgccgatggcgaggccgccagaccgaggtgagcgccgatggccgcgagatccgcagtgctgagatcatcaggtaggtgcggtcggagggcgtcggagtctgccgccgcttcgcgcagttgcgcgatgtgcttcatgttggcgttgatccggtccagtgaagcctccagtcggggacgcagatccaccaggccatcaaggagcaactggtcggcctcggagaacgatgagccgaataggcgcccgcgtacgtactccgacaccttctggttgctctttcgagcagccgccgacagggcctttttctcgccagcttctaggcgaatgctgagttgttcggtgacggccatcgtgagggtcctcgctagtgatgcgatacaattgtaatacagctcaaggcagcaaaagtcaacgcggacaaggttccagcctgggtcgccgagcgcttgactgagccgtaccgcgagcggatggattcacgggcgcagatcgccgccgcgttccagggcttctagcctgttggctacattagcaatccgacggtgatgaaagctttttgaggtcctttgaccatcttctcaactatcgtatatctccgaagtttttcagaagaattaacttacatatgtcgatcacaggcataccgacttgtgtttgctgcgagatgtgttgccccttgggtgctggtgttgctgtcacatgcactctagcgatagtaacgttcgttggcatgtttcccgcagagtaagcaggttcgatagagtccgtaacgaccagtcttctccagacccaatggtccacagcaccattggcatattggtccttttccctgctcggcctgccatagtcgataggaaaggtagaggaagatgaacactccgtatagaaatgcgactagtgacatcaaagataaaaatatgccagcggcgaaataattatccttcaggggtgcgatgattaccgtgtcaaataagaaagagatgattataacgataatcgctttactgtaagcaaaaaatattttgatccaatccattatatttataatctcatgaaaggatttattatactaaataactatccattctgcgccagatcaaattaacagtagcgttctttatatccgcattggttgacatggcgcctggtttcgtagtttgtcggcccactcaaaaagctcccctgtcgatgatggcggcgtcgcttgatttgcgaagtcaatccagcacatagcattgaattgtttgatcgacgcttgttgcaccatgaacccaacggtctccgtaaattcgtagatcactactgggatgaggatggtacatacggcaacaaccagtggtttatcccatcttctttttcgtgaattgctatagcgattcaacgacggtcgcatgctagcccacacgccactggcaacagccgtcagaaggaccagtactatcagaaaaggctggtttgctaccaatgccagacgagccactgtcatggttgcaataatcacaacccaggctaggggccaaaggattaggtgccgtatactttcgctgatacacggtgtcaaatgtttacggcaggatgccgctgcatctgttgatagtgctccagccgcaactaggccgtgcagatacgagtctgcatcagcctgccattcgggttgttttttatatgcccgacgctccagctcgactacccaatccgaactactcggcgagtattgcttgagatgatcgaagaactctgtgaccttttcaacgtaagatttacgcttaaaaaatcgacaaaaattattttttataaaaaaattaaatattttaatcattcattaaatacaaaaatataaaaattattagggatgcttggagtttctttaattatctttatttcattctctccttaaatctttctgtccaaatactgcctcaagagcatctgctgctgctgtattgtaatgcccaacgggcattgaggtattcacgacggaagaccttggcatctcaacctttacccttggtgtcgtattagctgccataaccggcttactcgcttgtatggtgtcaaacgtgggaaagcgagcgacgagccagttttcccacttaccggcacgcttaatgagagaggtgcgataaacagcattatattgcggagtacgcgaatggtaattcgcagcccgcgtccaaatgtcaccttgatcattacgtaagtgaccacgcaaacgccacgcagccagatcataggaatagcacccaccccgtgctacgtcttgtggcgtgatcccatattgacgtagctcgaccagataggccgtattgaactgcattggtcccacatcatgtgtgccatttgtgttcctgacccattggcctggcttgccgccctcttgttcggctactgccaatacaatgtttgctggaacttcgtacttgacggcagccgtaatcgagcaaacaacgcgctcttgtatttgcggcggcagatcaaggaagggcatcgtgattactcatgctgcttacctttgttcacaaaggcggcaacctcatcattcatggccgtctcagaacctctctgagctgcacctgctaggctgtcacctttgaagtcattctgccctgatgccgcatccatactgttacggattgcggatgcaaccttgccgccagtagtgtctgccactcgttctttggcggatgcaatcacgcttccagccttgtctttagcaacttggccaacacctttggcaagactcgttcccatgtcagcggcaaagcgtccagttgtacccatcgccgacatgaagctgctactgccgccagaggatactccagcagaatttccacctgatccagaacctgatccagaaccaccaccgctcgccatgttttgctgggcagactggaatgctgccttgagagccgaaacaccccccccagcgcttgataaaccagcagcgagagcagagcctgccgtcgccgctacagcagctccggtagccgccgcagcaatggctgcacccgcgccaaagttgccaatgccagccgtagcgccaccaccgcctacgatgcttgcgaacatcggaggaatcttgttcaccaacgcaagcaaaacgatggacgccacgagcatgaccaaaagcgccttcattgtgatcgcaccggtcgatacagccgcgtaatactggtcgatgaacgacttgccaatgccaataatcaagatcattgcaaatagctgcataccgaggccgatcaccgtcttgtagtagctaattgcaatgtccgaggtccaccggccaccaccgaatcccaataggaaaaccgctccataggacagcagccaccccgacacgagcagcagtagcatgttcacgccaatgagagccagcacaataagaatcacagtcgaagcgatgatgccaacggcagagttaacaggcgaccggatggagctatcgtcaataacctttgaggtaatgtcaaagccgatatcgacaataccggatggcgagagcgtgttacctaatcccgtagcgttggccgcaatttgccgcagcgaatcgatgatcgccgtcgacatagctggagcgttgatcaggagccaccagaagaagcccattaccgcaaagaaccggatcgtctcggcaagaaactcctgaatgtcagccttacgtaaggccatcattccataggtccagaccatacttagcagtgctaagctccaaaacagccagctcgcgtatctgacgatctcaccagaccaagtatcagcgacctgatggaaacgtccgagaatgttgtcaaacagaccgacgctatcgacaggtgcttgtgcttgcgcttgtgcggcaaagagcaataacgccaatgcaagcactggcattacaggaatcctcttcataggtcaccattcacgcggcttgctgggcgtgtagctgcccgactgaaactgcgcattggcggcgctacgacaattctcgtcacgcatcacaaggtcaggatcagccttacatttttcgagcatgactttccgctcgtcctcgtgctgtttgtagtattcaatcgaatgcaccggttgactacacgacgcgagcaagatactccctaaacacatacaaccaatttgaatagctcgtttcatttatatttccttggaattaccagtttttaaccggacttttcgtatagcttcccgaacggaacctctgatcagccgcttccatcagcgcggccttatctgcatcgttagacgcccgagtcgcgaccgcagcagcctgcgcagccaacatgctcctaatctgtaaaagttggttggtttgcgcactggcaagctggtttgccgcctgcaatgcctgcatttgtccctgtgctgtcgttgcctgcaattgcagcttttggagtgtcgcagcgtcgctaatgagtgtctgttgttgctaatcaatgcctttaagcactgcatcgtttgcatgtttcagcgcttccgaattgtttgcctgcgcatcttgcagagcttgcaactgcgaggacgagcaacccgcagcagtaaagcacggcgaggtgcggtaatagctaacgtcttgatagcgcgacaggtacgaatcaatgctgccagccttcttcttgtagtagctcaatgtgtcttgcgccaccatgagcttgttcatcacctgacttgcctggtcccaaatgtaagcgctcggtgcaaccgtgttttgcaacatgttttgatactgttgtaactgcgtctggtactgctgaatctgcttctcgacagccgcaacctgctgcactgcactgacgatattttgttccagattgctgatgtcgatcaccggcataccggcttgtgtttgctgcgagatgccaacaagcagaacaaccgctatgcccgcatttttgatggttaaagcatttttcaagaacgttctcatgctcatgtctccttggcgtcagtaatcaaaagatttgtacggctttgtgaaattgaggtccttcacaatgatgatgttgaaacgatagccagggcgaatttggagagtcggagcaatgttcagattcttcgagatcatctgcgccgttacgttgccgagctgttggccgagtgcttgactcaactcactactggcggttggttggctgtagatgccaccgttgtttctgtttcgatccatcgcatacgacgatgcagccgtcacacctgacatcagcagtgcagacccgaagatgcgcgtgtaatgatgattggcctgatcgcgaaaacccgcgtaaccagcattatccgcacctggcatcgcactgatgtccagtgccttgccatcgggaaacaccagacgttgccatgcaatgaggatcgcaccttgcccataccccacgttactgttgtacatgccgaccaagcgtgttccctgggggatcagcaaatattttcccgttgccgtgtcatacacgtcctgggccacttgtcccatgatttgaccaggcaaatcagagttcacgccgctaatcattacaccaggaataacgccaccggcacgaatctcaaagctagaacgcggagcttgtatctcttgatctagcttccagcgatcaccttgcccattgttggcaaactgtgagaaatccttgttactggacgatgcagagacctgcaagaggtgcggactgctctccgaaccgccatcaccattgccaaggctcgcacgaatccttgccaactgtgcttgataagaacttgtcagatcgccacctgctgcgttctcgtcgatttgccgtcgcaccttcgcaatctgtgcaagcatttcttcgcgtgattgtggggtagccgttgcactagctcctcgtgaggtcatcgacgtgcttccagaaccactaccgtcatagggtaatgtgatcttggagttagccttaatcgcttcctgaaactgctggagcttcgccatacgaagctgttgttcatcaggattgacaggggccgacaagctatccggatgatgcggtggcatcggtggtgcgtcaggattgttgaccggcgcaatcggaataccagccgtcgcgctgacagccggtggtacctctggcatagccgaaggaataaggcctgagccgtggccgctcagcacttcattcgccatcgtgcttgtgtcgatgttcttcttcgacactttttgtgtatccgaatgggccactgcgacattatgcatacgcttgacagccaccttcgcaatcaataaagcaaacaggcaaagtgcaacgatcccgatgatgagcggtaagttattgacccgacgaacgccgcttctcggcttggagtttggcgaggcgtcaggtgacatttgatcgttatcaaccattctcattactccttacgaacccatgcacctgccggatacagattgccgttcgtggcaaccacgaatgctctactgatcgactgcacaccaatctgaaccgtgatgcggtacagattcattgactccggggaatcgaccacgtaactaaggggtaagcctgatgttggattcgctgtggcaagcgctgcggtcgccgcggatttggcaggtacagcctgcggctgcgggttgtactccaatacggaataacctttctttcgcaacgcggatagcaatgctgcaccgtaggggtcagtgattgtctgttgaagatccaagcgcgtatgtgcgggcggatacagcgccacgagctgggctaccgttacatcggccattgttttgttggcttcaatggacaccgccgcataattaccatgcatgttttgtgttgcacagctcgtcagagcagcaagcatcaccacactcatcatgaacttacgcatggttagttccccctcgtgatcgttaccttctgttgactcgaaccaacgccggatacgaggatcgctttgtcaaagatcgtatctacgatgtagcgggcgtcttgaacgcgatagttcaccatttgcgtctcatcatctttgaacaggcttccgtccttatggacgacaagcagtgctggcgcttcactttgttgcatctttgaaggcatttcgatgacggttttacggccatcgttgtagacacgaaccggcttccagcgaaccgagccgctcactacgtaatcaaagctgaggttccccaagtactcaccggtatgcggaatagtgttgtcctggcgtacctttgtttcgcgggctttgattgcatcccacttggccatcgcgtcttcggggtacgtaaacgatacaaacggcatgagctgcgtgcgactagaacgcaggcggaagtgatacgtgcgccgatccgtggtgagcacgagcgtcgtatcaagacccacatcaagaggcttcaagatcagatgtattatttgcgacgcacctgaacctgtgacggctggctcaacatgatagcgaggatcaccaatgttcgtgccattgacgttctcacctggctgtaaagcaatgtcacagacttgcagcacagcacacatgatcgggtattgcttgccaggtaagtacggccagttgatcgaaccatcagaaccttggaatggcttcaggtcctgaccctcctgccactttttgccgatagcgacagccgccttctcctgcgccgtcaacttcggctcgtttttcgagaaatactgatcggccaacgggtcggtgcccggagctgcgaatgtcaccatcggcactaaaccgagaatcagagcggggattaaagtcttttgcatagcgaggctccaagcttcaaagttgcttcgaccagttgtagtctttgacgaaaatgaaatgcgggttgatcaacatcttctccggcttcacttccgtatccttgttttgataaatcgtcacgagcgcacgcatcatgtacggtgctcccttgagagaaccgtcacgcccccgcactgtttcctgccagtcaatttgccaagtgtctttagactgctggagaacagatttcacatcgacactcaccatttcattcgcagcgcggttgaacggattagcttctttcgtaccgttcagatattcgtttgtcttgagcgtcgccggatcgttgggtacgagatagccatacgctttcagcacagctttgtgctgcaactcggcatctggcgtcacgagacgaatattcgtaatgaaatcggaaacggcagtgcgataatcgtctaccagagcctcgggaatgtgatcaggacgtgtcatcgaaattgtgttgccgctaccgtcctgctggaacaccaagggaatgaacttcgattgacttccgatgtaggtcataccaccgacagcagcaagagcgatcaacataccaagcaagccgacgaagatacccacctggctatgttgcattacttggccaacgtgactgttccacgaacgtcgcgcattgagataaggattcaccgtgttggtgtctggcttttccttcttcccgaaaggatttcttagattgacactcatgctgctactccatagtcattgggactcacatattcatcaaggcgcagccactcatgaacccaggcatcaccgtgcaacgcttcgagcttcctgatcattgcgatagactccttatcggtagaccccacgaaagccagagcaagtggtccaagcgcgagctggtacaggcgacgtcccttttcagagacgtagtagtagtcacgtttcggtacggctgatgcgatgatttcaatctgacgattgtttaagccaaggcgaccgtaaatctcggcagtcttttcctcacgcgcattcgggttggccaggaatatccggcaggcggtcgattccgtgatgatgtccaaaatgccggactttgcagcctcggaaatgctctgcgttgccatgagtaccgagcaattcttcttcgccattgagcgcagccattcctcgatcttgtcgcggaatgttgtgtgagcaagcatcagccaagcctcatcaagaatcagcagtgtgggtcgtgcatcttcctcactcagtgattcttcgatccgcatgaatagatacagtaaaacaggcagagcaaacttctcaccaagacccatcaactgttcaatctcaaatgtcatgaagtcggccagttcaagaccatcttctgctgcatcaagcaggtatcccatgttgcggtcgatggtgtacggctcgagagcttcgcggatcactttgttctgcacggtcacaagaaactctgacaacgtggatgctttactctcactcatactgaggatcgcttcggcaatcgcgttgcgctgtgcaggacttgtaatcacaccattcaaggcaaggatcgtatcaatccattccattgcccatgcgcggcgggtgcgagtatcaagtcgcgacaatggcgcaaacgcaagcttgtcggtgttcgatgcaatactgaaatgatgaccatgcatggctttacatgtcggatacatcgacaaacccttgtcgaaagcgtagatgcgtgcacctagataacgacgccactggaatgccaccaaagccagcttggttgattttcccgtcctggttgggccgaaaataatgcaatggccaagatcacgcacatgcaaattgatacgcataggagagtttccactcgtcacgccatgcagcaagggcggagcgttaggagggaaaagcggtgatggtgcacgattttcacctgtccaaatcgtgctggtcggcagcagatcggcaagattcatcgtattcaacaaaggacgacgcacgttctcgacaccatgccctggaagagaaccaaaataggcgtccatcgtgttgatcgtttcgacacgcgcagtaaatgccaaggcgttgattgccttttcaagtcgtcgagccgactgttctacttgctcgcgactttcattcatcagtacgacaacactggtgtagtagccctgcgaaacgaggccactgttcgtttcagcaatcgctgatgaggcatcggccaccatcgaaaccgcgtcttcatcgatgtgactggtattcgtattgaatacctgatcgaagaaaccacgcattttctgcttccactttttacggaatttctcgagatgagacacagcctcgtgatgatcaagaaaaatgaaccgagaagaccaccgatattcgataggcaattcggccaataccgataaaattcctggatatgactccaagggaaacccttcgatagcgacaacctggatgaaattacgaccgatttttgggacaacaccagggtatagctcttgcccaccgatgagcgagtcaatgtacatagggttgcttgggagctgtatcggatgattcaggccagttacacagaagtggagccactgcaattgctgatcgtgcgttacagtcgaaccatcttccttagttatttttacgccccgcaaacgttcaagctcaacagccaaggaaagcctgtttttcgagattaatcacctcccgcttgaagtggtcgataaggtgtgcggtgcgcgtcttatcgttaggcttttcagcatcatcatggaacatgagttccacaaatctgcgttcggccaacacagggggaaaccacgtgaccgtgactacgaagaatccttcgtacaacgtgcctatgctctcgaacaatcgtctacgctcctcatcgactgctgccgaaaccgcatcaggaaaatgagaaagacttggatcgctgtaacttggagcgggtcggcgcactgcatcgacgtgaaccatccaagcattgtcaaatgatgcaagcgcttggttgatacgaaaggagatcagctcccgctcagcttccgtagcacttgcgttatcagcaccgcggtacaaccacgacgccatgaacgaaccgttcttgccaacgattacgccatcatccacgacagcggcataattgagaagatcagcaagtccagcatccttggaacgatgatttttcagccgcaaatcggcattggcacgctgcacaagcaagaacaaccagatgagcagcaccgcaccaagcaatgcgattgcaatcgtgattatttgaaacatttgtattggttcccttgggaagccgtgttgttgcggaacggcgtcgcacgtggcgggtaataagccttgtaacgtcgattacgcatgtagacaaaacgtatccgagggtcggctttggccagctttcggaaaagccaaagggcaaggaaccacatgccaaggccaaaccctgctgcaatccagtcttgcgccacaaatatgagaaccgcgcacagcaaacctgagaacatgaccatttcacgatcgccacccatgaaaaggttgtctctgtttccaaccctacgaatagggatcgtacgtagtgccatgattacgcgagcctggcttgtaagagattgctcagatcatgcgaaaacgccgtaatttcagcaccctgccccgtgatcgcactcaggctgttttgtgcggcaaccaagaaggacaacaccaggacgatgaagatgagcgtgcgcaagaagccgttcatgtcaccaccgaaaataagccctgcaccagcagcaacgatgccaacaatcgctacggtaaatgcaaacggacctgtcacagactcgcgaattctagtgaaccattcatctgaaggtagaccaccgccagccgtgtttgacgcgaacgccggatgcgtggcaatcaacagcagcagcgcaacgccaaggatgagaagcactcgataattaacgttgatgcaagacttggtaaactgcatttctatactctccttagatatttcgtgtgatatagcaaccatttttatacccttgaatctcgataattccttgtacgcggcggccaacatcggtgcgggcgatgtgaacaatcacatggactgcttcgccgataaggggttcgatagcgtctggagcagattcattacggctaatgagtgacttcaaacgggtaagagcagaatgctcgtcgtttgcgtgcaatgtggcagcacctccttcgtgccctgtattccatgcgtctaaaaggtctaatgcctcggggccacgcacttctgcctgggccaaagaaggatgccgaaggacaaatcactgaggctggggacatggttgtatacgttgctggttatccggctatttacggaaagcagccactctactttcaagatccgattttcatcgcacgcgcagcagtacctgagccgaagaccagcgacacactgcgtcttgtgcatgagccaaccctgctggatgagatcaaaatatgaaccgcatgattaatcgtcccgtcgccgtattggttgtggtcggcatttttgggattgcggccagtggcgttatgtgtttggtcggcgctcgtgtgaatacaagcaagagtattccaatcggactgtactggacgagtagtgcgcccgttaccaagggaaaatacgtcattttttgcccgccgcagcggacagtgttcgataacgcaagaaagcgtggctatatcggtccaggattctgtcctggtggctacggttacatgatgaagaaaattttagccgctaaaggcgacacggtttctgtgacgccacagggagttgctgtcaacggaaagttgttgccatacagcaaaccattactggttgatggtgtcggtcgctctatgcctcgtatgagtgacgagcgatacacgcttggcgaatccgaactgttgttgatgactgacagaagttcaacgtcattcgatgctcgttactacggaatcatcagccgcgaacaagtgaagtcagtgatccgacccgttctcacttggtaagaacaatcaagaatatagggaatagccaatgcgtttattcattgcagagaagccatctgttgccaaagcaatcgccggtgagctgggtgtgacagggaagggtgagggttacattgaatgtggtcacgatacgatcacttggtgtttcggacacatgctcgaacaagctgagccagatgcgtacatttctgaagacgttccactgaatccaaaaactggtaagaaaatctggcgcgtcgaagaactgcctatcatccctgaaacgtggatcatgcagccccgcgaagacgcgaaagcgcagcttgaggtcatcaagcggctgctgaaaaaggcaactgaaattgtcaatgctggtgacccagaccgtgaggggcagttactcgttgatgaagtgctggaatacttcgactgccacaagtcggtgcaacgcttctgggtatcggcacaagattccgtatcggtgcagcgtggccttgctgcgctcagaagtaacaccgcgtatcaaggctttgccaatgcagcacgggcacgtagtcgggccgactggctgattggtatcaatttcagcagggcttatacgctgcgcgcacagcgcggaggttcgcgtgcattgctgacgatagggcgtgtacagactccaacgctggcgctggtggtcatgcgtgatcgtgagattgaggcattcaaatcgattccttaccacacgatccgtgcagcatttaaacacgaggggggtgtattcgttgccgtttggcgggcgaaagaagatcaagttgggctagacccagaggggcgtttggtcgacacggtcatcgcgaacacgttggtcgaatccatcacaggtcatataggtaaggtcatcgagtacaagcaggagccaaagaagaaggcacagccgcgtgcttattcactttctgacatgactctcttggcgtctaacaaattcgggtatagcgcggcagatgtgcttgaggtgtgccaatcgctctatgagacacataagctcacgagctacccaagaaccgattgtgggtacctgccggaatcacaacatgccgatgccccacacgtgctcgaagccatcaagcacgtttatccagaggttgctgtgcttgttgatggagccaatcagaacattaagtccaagacttgggatgacagcaaaattaccgctcatcacggcattatcccgacgatgcacaagggcagtatggctaatctgtccgagaaagagcgcaacatctacgacttaattgtgcgtgtttatcttgcacagttctatttgcagcacgaataccttgccaccaccgttaccctcgaagttgctggtgagcgatttgatgtaggaggcaaggtcgtgacccgtaacggttggcgtgacgtgtacatcgaggccgaggaagaagccgagggtgagtctgagtctggaagcaacaaccaggcgttaccaaatatgcagaatggtgatgtggtgtcatgcgtgaaggcgacacgcattgatgctaagacaaaagccccaagccgtttcaccgagggaacgctgacacgtgctatggagaatatccacaaatatgttacggatgccgagcataagaaactgttgcgtgacggcgatggcataggcacttccgccacacgggcgtcgatcatttctgaattgaagcggcgccaatttctcgaagtgaaaggcaagcagatcgttagcacgaccttggggcgcagcatgattgatgcgcttccagaagtggtgaaaagcccagtgctcactgctctgtatgaacgcatgttgctgtccatcggagaaggtcgtttggaggtggacagtttcattacgaagcaagaggcatttattcgcgaacaaattgcgaaggctaatgatggcgcattgaagcttaatggtgcgaaggaatcaccgaaggtatcggagacccataagtgcatggtctgcggtaaagggcttgtccgtcgtatcggcaaaaagactggtaccaatttctggtcgtgcagtggctatcccacttgctcgcaaacgtatcccgacgccaagggaagacctaactacaccatccaacacaaggagacatgagtatgaacatcccaaagattcctaatgaaaaagctggttctggtgacgagacgaacgtaacggacactctccgtgaaaagttgatcgatgccgagactccaggctttcaggccgaatgtgacccgaacgaggcagattgcgcaggtgcgtttgtagaggacgcattgagcgaggaagatgcgcttgagagtgctattgatctaaacgacgcacaaagtggtgatgtgccggtgttcattgagtacggcgaaggtcttgatgttcccaagaacttcaccacagtcaatgcgtatgagctgctaggcaaacggcagggcgaatctgtcaaagatgccttggagcgtcttgaacgccaaggagagtagttgctatgggcgttactctcctccaagcgcaggccctggttgttgatttttgtaggaattaccccgtcgcggcgcagttgtcctattacattcgtgaaaccgtagaagagctgtacggcaagtgtccagagggtatggagcgaatgcttggcgcatacgtcaccggcccaggtatccatccaggacgctgtgacatcccttgcggcaatgctaaggataccgccagttttatttcgacactgcggcatgaagtcattggccatttcggccttaacactttcactagagaggataagaaggcactgctggatggcattagtgctgtacgtgaaaaaccctttatgcgtagtttgtggaggattgttgaggagaactacgcccacgagtccgaaagcatcaaggctgaagaagtctttgcgttgtattgcgaagggattgagccggagttgcatgtcactcgtagatatgttcacgagcaaggtgagcaggtttttcgtgaaacctgcatcgaccgcacgcggctgatgaacattattgatttggacagcatcgtcctcatggttgcgcaaggcctgcatgatcgcacgcggctacagcgcaactttaccgaattgaaccaacagttccgacaggagccatatatggaaccgaagaagccatttcatcaagttgttgccgagcgattgatcgagcaacttaaagtcggcacagcaccgtggcaaagaccttgggagccaggtcgaggtgggttgcttccgatgaatccgagcaccggcaagcgatacaagggcattaatgcgattcacctgatgagccagcagcgcaccgatccgcgttggctcacctataaacaggcggagactctcggtgcacaggtaagacgcggtgagaaaagcacgtcaatccagtattggaaggacaccgagaaacagattaagaccgacgatcagggccgtccggttctcgatgtaaaggggcaacctgtcatggaagaggtgaggcttgagcggccacgggtgttctttgcgagtgtgttcaatgccgagcagatcgatggcttgccgacgttgcaacacaatgaacagaccaaggaacagacatgggatgcggtggagcgtgccgagcgtatcttggaggcatctgcggcagtgattcatcacggggagcataaccgcgcgttctataggccttctactgacagcatccacttggccgacaagagccagtttccgagcgccgacaactactatgcgacgctgctgcacgaactaggacattggactggccactcgctgcggcttgatcgggacatgctgcatcccttcgggagtgagggatatgcaaaggaagagttgcgggctgagattgcgagcatgatcttgggcgatgaactcggcattggtcatgatcctggccagcatgcggcgtatgtcggatcgtggatcagggttctaaaagatgatcctcttgaaattttccgcgcagcggctgatgccgaaaagattcaggaatacctgcttgcgtttgagcagaagcaggttcaggaggcaacaaagcaacaggcaattgcgcagaaccctgagccgctgaggcagcaggaacaagctgtgcggctgccgagtagaatgcttgccgaccaaaaggttgcaattctactgcggattgctcgtgaagatcctaatgatccttttggtttggtgtacaaaggaatgcttgatatcgcttttgatgaagcgttcgggccgcttgtgaaggggatggagcaagtgagagaggtattacccctagattggaatggtcgtgtacgtgttgagtcagacgacagtgaacctaaccgttttgcagtatttgttcaacgtcaaaacggtgaatatgagtggttagaaatatgtgagacgagtgcagcaatggactcactgattgatcgcttggcagtgatcaatgcttacgcggaaattcatgagaaacaagcacggtacgaggaacaaaatgttcagttaccgagtatcacgcttgccgaccaaaaggttgcaactgcgctgcgcattgctcgtgatcttaaaagttcgtttcaccaagaaacgcttagggtcttttctgaggaagcgttcgggcctgttgttgagggggttagagatgtactacctgcggattggaatggtcgtgtacgtgttgagccaagcttcgtagttaaaaatagttacatgttggcagatgtctatggacgtgaacccacccattggagggtgtttgttcaatgtcaaaatggaaaatatgagtggttagagacatgtgagacaagtacagcagtggaatcactggttgatcgcttggtagtgattgatgcttacacgaaagaaaatgaacatgaacgtttaactgcgtttgctcgcattcacgagaaaaaagcacggaacgaaaaatatattttagccgctaaaacagccgttgctgataatactgtacaggaacagcagcaggaacaatatgtctcgctgccgagtttggcagcgatcagtgcttacgcgaaagcaaacgaacatgaatgggtggctgcgtttgttcgcactcatgagaaacaaccacggcacgacaaagatattttagccgctaaaacaactgttgctgatagtactgtacaggaacagcaacaggagcaagatgttgcgctaccgagtatcacggtttctgaaaaaatatggctcgatttgccgtataagcagaaagatgcagcgaaacacgccgcaggcaatcttgcagatgggaattgcgctatttcttgggacaaggaggaaaagcgttggtatgcaaggcctggtgctgaccttgacaagatcaaacaatggttgcctagccatgaagccaagccaacaaatctagcaactaaaaagacttggcttgcagttacttttgagcagcgtcatgcgctcaaagaaatcggtggaaagcttccgaacggtaacaatgcagttgattgggataatgctgccaaatgttggtatgcaaatcctggagctgatcttgataagttgaagccgtggattgctacggaggttgtgagtcggcaagttccggcactttctccagaaaaagaatttgcagagacgttacgaagcatgggatgcctcgtgagtggtgaacatcccatcatggacgctaagaaacaccgtattgaggtcgaaggagacaaaaagggggaaaaggctggtttttatgtcgcttacctcgacggccacccatccggctatatcaagaacaaccgtactggcatcgaattgaagtggaaaagcaaagggtactcgctcgatccagagcaaaaggccgcaatgcaagcggaggcagcggcaaaattggctgcacgcgcagagcagcagcaacaagaacaagaggctgtcgcgcaacgtgtcgtaaagcagatggatgatcttgtgactgtgattgagccgacgccctatctaaaagctaaaggcatcacgccacaggctggtatatacactgacagtgatggccagaagacctacattccagctatcgattcggatggtaagcaatggacgatgcaatacatccaagaggacggtacaaagcgatttgcaaaaggggggcgtaaggagggttgttttcacccaataggtggtcttgctgctatcgcagcagcgcccgtgatcgtcattggcgagggctatgccactgtggcgcaagtgtctcaggcattgggttatgggaccgttgccgcatttgatgctggcaacctggaaggtgttgccaaagcattgcacaagactttcccagacaagcctattctgattgccggtgacgatgatcagtctttacctaacaacccaggaaagaccaaggctcaagaggcagcgcgtgctgtagacggtaccgcgttcttcccaatcttcgcgccaggtgaacaggctgataatccgaaaggcttcaccgatttcaatgatcttgccactaagagcgcgctcggtatcgaagcggttgaacggcaggtacatgcggctgttagcaaggctatcgataatcatcagaaacgtgttcaacagcagactcaacaacaagggcaacacgaacagaagcaggaacgtcgacggcttcgcgttcgctagcagccagccaagaggtgggggagcagccgaccggcgaagaagtacgcgaggtgctgcgtttggctggtctttcaggagagaaagcggctcaggcgctgggcctgggagagaagggaggccgcaccgtgcggcgttggatttcagaagacagtggtatttcctatgccaactgggcgcttctctacgaaatggctggactggggttgatctggaaagaagattgacgaagccaaattggccacccaatcgtactctaagcgtgcgctgaccctggaagccagcgatacagcgtcggaatagacacacctaggttcttggccacatcctttggagggacgccgctggccagcagcttcttggccgactcgatcttgctatcggtcatcttgcgcttgcgacctcccttgcgcccaagctgcttggcgacttccagcccagctcgggtgcgctcgacgatcagctctcgctccatttcggcgagactagccatgacgtgaaagaagaagcgccctgaaggcgtaccggtgtcgatagagtcggtgaggctcctgaactggacaccttaagcttgtgcaactcgccaaccagatcgaccagttgcttgaccgaccggcctagccggtcgagtttccagacgaccagagtatcgccctcgcggcctggccggtctgcccgtgtgccgctcaccttgtactcaaagaccttcttgcatccggccttggccaaggcttcgcattgcagttcaaggttctgatcctgcgtcgagacacgcgcataaccgatcagcatgaagcgcttgccagcgactcgctgttggacgcactcatttgacgcattgattctacattttcatcgaagcgttccatctggagactgatcaggtgaccaggaagcaacagcgagtagatgaacgtgaaggtcatcaagccgaggtagagtttttccactgacgcaatgagccgtccgtctgggacatgtctagccatgatggccgtcaaaaagaccagcgcaagaacaatcaagtagaagatacaaagtcactggtgacggacgagcctagcgaacacgttgctccgtttcacggcatacaaacgccatgttcgttcttgatgcggacctggctcacctaaacgtgtgatcatgctgatgaggaagccagccaggattgaaaatacgttgatgatgatgccgcgagcttcatcattgctatgtacgaacagctgtccatagcagccgatcaccactgaaacggcggtaattacggcaaacagtccgatgcgaccccaatcaatttttatgcgtcccatgtcattgctccattttctcgtttttgcagggtaggccgtcggtacggtgtccttgaattagtggcacttcattggcactgcgaagcttgcgaagaatagcagcagctgtcacggcatttgctgcgccacgtgtttcactcgcaaaatttccacggtgcgagtttcgtccagcacgcgatagaacacgatgtaattccgatgagtgaccagctcacgcacatagtccggcaggccgggccgcccagtgcggcctatctccgggtgctgcgcaagcggcaaggtcttatcacgtagttcctggccgaaactacgcgcccttgtcgggttgtttttgccgatgtatcgaacgatgtcgcgcaaatcttcactggctttgggccgccacttgatacggtagggcgtctttgccttcgccatagatcagtaggctgactcgggccgccattggcgcaaaatggccttgaagtctgcttcataacccaggctgtcggggtacttgctgacacgggcgatgcaggtaaacacggtagtcatgtcgaccgtgattgcatcgcccagtccccatagcgcggtaaggtcgaagcttccgcaactgtcgacgttccaccatgccagcaggaaatcggcaacgcgccgactctcgccggtaaaggccgacgggatgccctcggactggtgcggttgctccttcatgcgcgcttcgctcctgccgccttgtgatgtgcaatgcaggcatccatctcggccatgacttcatcgtgcgagatgttcggcctggggtcgtcgatggattcctgaatctcggcggctagccactcattataggcagcggcttggtgggccttgcgcagcgccttggcgcggttgtcgctggaacgctccaccagctcacgctcggtcgggttccacccgctggcatcgaactggccgatggtgatgcccacgtcgcgcaacgcattcatggccgtggctggatttccaaagcgacgcggctcgctgctgcgggccttcgccagaacggcccaggaaccgtttcgcgtggcaatttgaactaggaacgcgccgccctgccctttcaaggtcacgcttgatacgccaccggcctcgctggctgtccgaagctgttcaatggtcatgctctgcattgttctctccttgcgtctgagaataacgaatattgtgcatgagttattgaaaatatgcaagcgcctatatccaacgcaacatgcctgatccactttcgtttttcagaagaattaacttacatatataagtatgtatgtaattatgtaatgcggcaggggagttaagtatctacggtagggcttctagcctgttggctacattagcaatccgacggtgatgaaggctttttcaggtcctttgaccaccttctctactatcgtatatctccgacgtttttcagaaagcatgaagcgcttgccagcgactcgatgttggacgcactcatttgtgtcgctctgagcggtccgtcttgatgccgacctggctcacctaatcgccgcggaattcttgccagaaggcagaaaaacttaattagtttcctctgatgcaggataaacgattttccacagtacagcattttgctttccattttcagttgttgaagctcctacgacaatagtgccgtcagcggatattgccttaatttcagaagctcctgaattatcatttctgaatgttcctaaatccgtttttgttgctcagttttcacctgaccaaatgatggcatgaaggctcttagagtcggtttcagcatatccgacagcaattttcccatcggaggaaagcgcggtaacataagaactgcctaagttatctttttgtagcgttcccaagtctgtttttgttgcccagttttttcctgaccagacaactgcgcgtatgaattttccttcttgtttattggaagatgaatatccagcagcaattttcccgtcgttagaaagcgcccaaatcccagccatccctgagttattaaacctcaatgttctgacttcgatttttttattccaattatctcctgaaaggatggtagccttccttaggctgatagcttgaaaatggtaaccctactagtgatgaagcatcataattccaggatataacttttccatcgctagaaattgcattggtaatcgaagatacgtttccctgcgagagaattaacttctctgatacgaatggttgatttgcatatgcagcatttaggtttcctattaaaagaacacaggtgaaaataaactttgctttattatgattactcttttccattaaatttccttaaatttaaaaagatgtcaatcgatttgcataagggcgttcccttcatccgatacgatgaaggattattatccgtcatagatgcgagcgcgtacaaactgtagatgcagtgcgttgtaattaatacgctgtaactgtactgatgttataggtaccgcccggtatcctgccgctggcgcagaatgcggataacatccaagtgatcggggtaatccatgaaatacactacatgcgaaccacataggtatttattgaagtccggcagaacagaagggcggccttagctttgtacctgctgccagcccctcgaaaaccgcaactaggctgcggtggtagctgtcggcttgccctatcgaccagtgcctgaatgtgtagaaccagatttcttcaagatcggcctcggccagcggcgtcagtcgataggacttagccatgctgcgtgtgcatccggctcaaaaacacctcgctgtcgaacgggcgcggctcgccggattggtggcgaacattcagcgcatcttgcagcgccttcacctttgtttcgtgttcctccagcagccgcagaccggccctgacaacatcgctggcggtaccgtagcgaccgccctggacttgggcatcaataaagctggtgaagtgcggcccgagggcaactgatgtgtttcgactcatggcattttccttttaatgtaccaatatatataaaatattggtacatcgctacgactcctatcgaaactcattgcaatggcatggtatcaagaataaagtttcaagagctattttcgagaattgcaacgcattgattccacatgtcatgccggttgcctttggtgtgattttcgcaaatgaccgttttttagactcaatagcttgcgcatttataccataacatttaatatactgtcaatgatagcataaaaatccggggctaccgcaatggcaaacgtacatgtaagaaatctacctgatgccgtgcatcacgcgcttcgcgtgcgtgccgcccataatagccgtagtaccgaggcagaaatccgcggaatcctggaggtcgctgtgcgaccgcccgagcgcgtttagccaacggatttgctgttgccacacgcgacacaagccctttccaagctgctggcctgattgtcatcgaccctattggcccttcccactagagatgtaggaatcttcgcccttcaggacggggaggatgtcaaatctatcaatgatgcacttttgcattttgatcggatagatggcgctttttgcagctatgtgatcactaccccaaggggtagacccagcagttgtgtcaccagccgccatctgagacgtcagctggtgtatcccacttccttatggtgtcgaacagccaagatcgtgacggtatcgccatcaatgtggtagcgggccacataaccgctatctccgaagtcaatcagccattccctgtactcatcgggcatatcatcaaccggacgaccgatatgtggctgcgctccaagcatccgcgcaccccgcatgatggcttcaccggcccgccttgcggcatcggtgttcttcggatgcaggaaattccgcaatcgttgaatgttcaggatggcttcgggagcgaagatcacccgtggcatacgggcgctgacaattcattttcagtgccccaactcgaaagccacttctcgacttcttcggtcgtcacgtgcaggccggtcgcctgaaactcttcccatgccttcagcgtgtcctgccgaaacgtctcacgcttttcctcacgctcaacgtactgcgcgatcgcctcgcgcatgatccagtgcgaagtgcggcggcgaacatcggccagatgctgcacacgtcctttcagctcatcatcaagcttgatggaggttgccatgcccatgcgaattcctatagtaaaaagtattactaataactactataatctaatcactagatgtcgaactgtccatccatcggcatggtgacgtaaaacatttgtttagcgacatatctgcaacagtcctatgcaccgaccttattctcaaaaacgttcgttacgatccgcggtacttggtggttgatctccgctcggagttccgcgcccaagcccgctcgctcgctctttctcgtaccagtcctggtcttcaatgacctcaagcctagcggcgggtatgaaaacaaaccaccttgtcatggagcgcattcagtcaactcagctttcaaatgcgcccaactgacagcatgggcacgatcatgatcaaacgattgcaggcggcgctgaagttcctgaaattgcggcatcagcaactgtgtctctgcttcgctcagactgtccctaaagctcgccgatgagcgccagcctctccggcgcggtcatgcgcgcaatgtcatcatggatcatgacgatgattcctaagatttgcttgttgtggagaacagacgctctcaaagtgaatttgagtgtcttggatgtggctacacggccaatgcggatattaatgcagcgcgtaatattatattttgtcgcgcacctagtcatgaacgtgagactttattcccaattctgtcacattattcatctagaagaaatcacatatttatcatttcatatatttttttgcattatttcaataaaaggtttgttatagcatcctttaggaatcacaactttatgcaaatatcatgaataaaactagactagccttacttttatcctttcttatcccagtcacttttgctcatgctggtgttgataacaaggattccaaggaggaattcattatagacaccccctctaatctttctactcaagaatccacagaaaattattggactgaggaaagaaggtatgctgctaaaccgaagagtatcgtgcccttaggaaacgaagtatcaaaaattaaagccgaaacaggattagaaagttatatacgtaatcaaaaagaaagaacagaacaattagttatagagccttccactgggatggattgggatgactcttttcctatcctttccagtgtaaaaggtgttcctgaaacagctgatgtcagtcgttaccctttctcgaatgcagggaaaacatttttcacggattccaaaggggatgatttttattgtaccgctcaatttgtaggcagtaatcaagtattgatgacggcgtcgcactgcctaatggaagataatgggaaatggtatcgtaatattgaattttatccacgtgccggtggaaatatagtttttgaacctttaaagataggctgtaaaggtgtccccgctgatgcgataatgaatggggaaagaaacttaggtaaagattacggctttgctactgtatataagtaaaggcattggctcatttggattgaaaatccacacagctgataagagttggacggccattggttaccctgtaaattatgggcataaaggtttctttttgcagaaagttaacggttccaagggaaagatttttgattttgtagattcccaaggcaatgttattagtaaggttgttcaaatgttagataatccaatgttggaaggttcaagtggtggagcttggattgctaaactaaacgcaagtaaaaaaggctatggaaattatgctgttggcctaaattcatttggctatactgaagaacctactattacgtacggcccttattttgataaaaaagtttttaagcttttaaataaagtgaagaactcttgccatattcaatgatttattaatattttagatttacatacacgcaatgagtatatgtgggacgcatctgttggattgcctatgaaaatgggcaatccaatcaagccactcggctgtaatcttaagtcagtgcagtgcagcaggttgcggctgtcgagaagcagattcagcagtaccagacgcagttacaacagtatcaaaacatgttgcaaaacacggctgcaccgagcgtttacatttgggaccaggcaagtcaggtgatgaacaagctcatagccgcgcaagacaccctgaactattacaagaaccagataggtggtattgatgcttacctatcgcgctatggtgacgtgagctattacaaaacgttgccgtgctttggcatcgacaacaacgaaggttcgtttagcgacataacggaaagaaaattagctacagcccgagttccgcatgggagccgagacggacgagcgtcagcgttttgctatccacccgcgtgtagatcaggactaggtcgagcttgatgtgacaatcacgaaggtctttccagttgccaagcagtgcgtgatctctgtgccgaggctcaaggggcatgtctttagcaagggcatcgatcacgggcagcaggtcgtcttccagcgtggcgcgatgctgccccttggcttcgcgcttcaagtcacgtttgaactgcccgagttgtttaatttcccgcacggatagtcgctcgaagttcacccagcgtgacggtctcgcccttacctgcacgagcctcccgcatggccttgatggtggtggcattagggattagcggctcaaaaggcaacgccttgtcctgagccaccttcgtgagcaacagccgaaccgcatcggaaatggtcaaccccatcgccgccagtaccacggttgcctctgccttgatcgcaccatcgatgcgcgcttgcacaagctgattcgcagccatcagagcctcctaaaaaaacaataaatgaattacattgtaattcaaaaaagaaggaagcaagctaatttttctttccgtagtaggagtagggaccatgtgtgcgccgtttaagccaatcatccagcggacgtagaacacttgtttagctacatatctgcaacagtcctatgcaccgaccccattctcaagaacgttggtaaagcagattgccaagatcactagaatcatcagaacagtgacgaacagagtgcaacgcgatcacaaccgctgcatcggcaggtgtgatactcggcagtctctcgttagaaagatttccggcagctatttccttaacctaacccaaatgtttttctcaggcctttctcgatcggtccagcaggcatgaaacggcgcaatttagccagacgtgacgcctggcctttgggggtatggcgcatcttccatctccccaaggctgcattgagtatcgtgctggctacgccttcaggatcgggcgctttctggacattcttctgaatggcttgggaaacgatgtcaaactccctgctgtaatcaggaatcttggaagctgtctgcggtgcattcagatccatattggttttggtaaaagacggctcaacaagcgccacacgaatcccgaattgacgtacctcgtgatccaacgtttctgagaggccttcaacggcgtgcttagaagctgaatagagcgccatgtagggcgcgggcagaaagcccagcactgagctgatgttgacgatccgaccagatcgctgctcgcgcatgtgcggcagcacagcttgaatcgtacacaacatgccaaaaagattggtgtcaaataaagtcttagcttctgtaaccgatgtttcttccgttgcgcctagtaaggtcacgcccgcgttattgaccagcacgtcgatacgcttggcttgagccataatgttttggattcctcgttcaactgatacgtcgtcacgaatatccatctcgacgagcacaacccccggtattgcctgcgctttttccgcattgcgcacggttccgaatacttggcaaccttgtttggcaagtatcaatgcggtcgcacgtccgatgcctgatgaaacaccagtgatgacaacaactttagaatttgacatggtcgttccttttgtcaattgattagtgttacgaaatggccagttttaagaagtcactggcctgatcttgaaccaaatggaatacatggctggcaagaacactaaagtcataatcgttcctgcgaacgtgccgccgataagcgtgtaggccagagttccccagaacaccgaatgggtcagcgggatgaacgccaagatcgcggccagtgcagtcaggatgaccggccttgcacgctgcaccgtggcctcgacgaccgcgcggaacggcggcaggccctcctgttcgttgtgatggatttgcccgatcaggatcagcgtgttgcgcatcaggatgcccgacagcgcgatcaggccgaccagtgcattgatgccgaacggctgctggaaaatcagcaaggtcggcaccacaccgatcaaaccaagcggactggtggcaaacaccatgaccatggccgcaatagagcgcacctgcaaaatgatgacgagcagtgtcagcgcgatcatgatcgggaacagcggcagcatcgccgtggtggccttggcggcttcttcaattgagccggcctgttcgatccgatagctcgaaggaagcttcttgatgaccggctgcaactgtttcaagaccgcggtggaaacgtccggcggttgcagtccttcggcgatgtcgccgcgaaccgtgatggtcggcgtgcggtcacgacgtcgaagcattggatcttccatgcgcacatcgactgtcccgacttgagacagcgggatgcgttgccctgccgacccgaccagcgtaaagccggcgatctttgcagggtcaaggcgaatgtcaccagccgcgcggccgaccacctgcaccgaacggatgtcctcacgcacctccgtaagcggcacaccactcagcaggaattgcaactgcaaggacacggagctggaggtcaacccaacggcattgagtcgatcctgatcgagtgtgaagtgtaaggtcgggacgcgcggcccccaatcagtattgacggtgcgcatcattggattggcgcgcatcacgctctcgacttcactggtaatcgcgcgcaacttttccgggtctggccccatgacgcggtaggccacgggaaacggcgaagggggtccgaacacgatttgggtgatgcgcacctgcgcttcgggcgccaacccatcggccactgcccggcgcagcctgaacttgaggacctcccgttccttgtcattgccggtgagtaccacgatcttggcgaacgatggatcgggcaattcaggcgccattgccaggaagaagcgtggcgcaccctggccgatgtaggcggttacgatcttggcttctttctgcttcaccagccaagcttcgaccttcgccgttgcggagctggtttgctcaatggaagtgccatacggcatctgaacttcgagcagcacctctggtcggtcggaagtcgggaagaactgctttttgaccagccccatgccgacgacagccagcacgaacgtcccgaccactacgccggttaccagccacttgcgggcgatgacgcgcccgagcaattgccggaagcggttgtagttgcgtgtgttgtagatggcgtcgtgcccgccttcgaccttcttgatgtccggcagcagcttcacgcccagatagggagtgaacgccaccgcgaccacccaggaaacgatcagggcgatgccgaggatccagaaggtattgctggtgtattcgcctgccgtggagcgggcaaatccattgggcatgaagccgatggccgtcaccagcgtgccggaaagcataggtgccgccgtatggctccaggcgtaggcggaggctttgatacgactgtaaccttcctccatcttcaccacaatcatttcgatggcgatgatggcgtcatccaccagcaagcccagcgcaagaatcaacgaaccaagcgtgatgcggtcaaagttcttgccggtggcggccatgatgacgaacacggccgccagcgtcagcggcacggcagcagcgaccacgatgccggcacgccagcccatgctgagaaagcacaccaccatcacgacgagcaaggcgacgaagaacttgatcatgaactcgtccaccgccgagctgatgttaacggcctgatcggttactttggtcagcgtcatgccaagaggcaattccgcgttgatcttggcgacttctgcttcaagcgccttgcccaaatcaagcccattccagtcgtcacgcatcacgatgcccaacaacagtgccggttccccgttgttgcgaaccagaaaggtggaaggatcttcatagccacgttcaacggtcgccacatccgacaacttcaatgtccggccctgcgccacgataggggtctgtcgaatcttctccaggttgtcgaatgccccttcgacacgaacgaaaatctgcggccctttggtttcgatagagccggcgggggtcagcatgttctggctgttgagcgcagcaaagatgtcttgcggtgtgacgcccaacgtggcaaggcggtcgtgggagaacgagacgaagatgcgttcaggctgctcgccgatgatattgaccttcttcacgcccggaacgtgcagcatctgttggcgtaccgattctgcgtcgcgcaccagcagacgttgcggttcacctttggccttgagggcaaagagggcgaacgtcacgtccgcatactcgtcgttgggcatggggccgataacgccgacaggcagtttccttgcttcgtctcccagcttcttgcgagcctgatagaactccttctgaacctcggaaggcggagtgctatcgagcagagaaatcttcgtgaaagccacgccggggcgcgtgtaggtttccgtgcggtcgtaccaccgcaattcctgtagacgcttttccagcggctcagcgacctgatcctgcatttcctgtgccgttgcgcctggccaggcggtaacgacggtcatctgcttgacagtgaaaggtggatcttccgcgcgtccaagttggaagaacgcaagaatgcctgtgacggatatcaagaaaatcaggaacagcgtgatggaacgctcacgtaccgcaagcgccgaaagattgaagcgtccttcgctcatgggtgcgctccgacaaccatcgcttcgccttggcctatcggcctgacgatttcaccttcacgaagaagatgcgcaccgagcgatactacctggtcaccgactttgagattgcccttcacctgcgctacatcgtccgtcagtccgagtaccttgatggaacgccataccgcttttgcaggcttgccatcaatcacccagacacccggtcccttcccagggtcgaacaatgcaccaattggaacttgcagtgatgatatagattcagtgctgtctggaatttcaactttgacggtggctcccagtggcgcatggagcaaggcaccttcgagcacatacctggcctcgtaagtacgggtcacgcggtcagccgcattggatagcactctcaatcttgctgacacagcagcctgaggattgccgtacaacgtcgcctggccaagtgatccaatggctggacgcagtgtctcaggcagatacacgatcgcctcacgctcccccgtgcgtgccaggcgcacgactggctggccggcactcaccacttgcccaggttcggcaagtgtctcgacaacgacgccatccgcatcggcaagaaggatggcgtagctcaacgtattcctagcgacatcggcctgtgcttcggcggctttgagctgtgccagtgctgaatcggctgcggctttgatttgatcgtatgcagatgttgaaacaacgcctttcgcgaccagatcgcggtagcgtctttcatcgttaaccgcttgtttggcacgtgcacgtgctgcggccactgtttcttcctgcgcttgagcctgcaagcctaagtcgatcggatctatgctcatgagaggctggccgcgcttaactatctgtccggtatcgacgaagcgcttcagcaccttgcccgatacacgaaagccaaggtcgctttgaacccgggccgccacgacaccagtgaatgatcgagatgtggcgaatgcgccttgaacggccacgaccctgactagcggagcttcggtacgtggatcaggggcgtggttgttaccacatgctgttagggcaagcggcaacaagtaaatacgatacgaggcaagctggcgcccaagcatgggaagatttcctgacaaagaatttagactgttgccattcttatacaaataaccattttggtaaatagtcatattgggcgagctaaggtgccaagctacgcaatatcaggttggatagttgggtcgtgatttcggtggcattgtccaagttatgctgcaacatcaacggattgatgtacggacgcatgaccaagtagatggcattgagagtttcatccagcggggtctttcgttcaaactcccctgactcgcggccatctcgcacgatctgcaacaccaatgctttaaggtggtcttcgtatacgccaactgacggccaagactcgctgatcgaggttgccgcaatgtcgtagagcttgcggtcgtggaagaacagatagttgccagcctccactaatgttttgaacatccgacgcagctgttcaggtggagttgaagcgttggcgacggcttcatcgacactagttatgattatgctcagccgattcgaacagatgacctccccaatcgcctgtttggagtcgaagaatctgtagatgtaggccttagagaagccaatcgctttcgccaaatcggaaacagtcgttttttcatagccgtagcgaccgaaatattcggtcgccgccttgacgatctgatctcggacgtcatgatcttgaggctgccgaagctgggacgcggaagtatatgctttagtcatttgatcagcttacttatgctattccagattaacaaccaagtaaccattttgtattttagtcacaaacatcactagcgcaaagatcatggcacgccgttttggccaatcgtccattcagccttcgataagctgagattttatttttacggcttggagcgagattgttcgtgtttaatggcctgaccattcggttttaaagtaaaaaatattttgatccaatccattatatttataatctcaggaaaggatttattatattctataactaactgtcagtaaattaaaaataaaaccctattttttcataggttacataaggtgactgacatcaattagtaaattatacaactgtttatcctaccccatgatgaagagctttcacgaaaacacataacaaaaacccgcaaagttaacgctgagaggactcttcgcagcttcaggctgctctccctacgtttttcctttagttgaggtcgtggattgtggacatagtaaacatataattaacgcatgcagtgatcgaaagatattgcaaaaagcgaagccccgcacggcggtaaccgtaacagggcttctaaccaataccctaactaagaaggagttagataatggccactaaacattttacatgcgcagagacagctaagctagttcgcaaagctcttaaagaatcctttcccgacatcaaattcagcgttaaaagcagtaattacagtggagaagcttctatacgcctgaaatggatagacggcccgaactttaaacagattaaacccataagcaagtgctttaagtcttcttactttgatggttcgattgactataaaggttctatatatcacataatgcaagggcagatagttcgctttggtgccgatttcgtacttcaccatcgtgattacagctatgcggccatccaaaaagctattgatgcagtttatcgacgatttgaaagtagtttcaaatccattggagcagacaagccgactctttccgattacaacagtggttcactttggggaatacgattggatggtatgcatgatcctgttcacctccaggttgatgtgtttttaatgaagcacaatgaccgcctaaattttaataaaagtataacggctgcgtcagtgatcgtgactcatgatgatggctatagccgcactaacggttctgggatatctgccgtgccgaatgatctctaacgtactgatacgcgccttgctcatcgcaaagcgctcattactaaagtgaaagaataggtattcaagggtgaaaacttcaagaaatcataatgagaactaaaaaaggcttacagcacaagagttcgacactctacagccgtacctctctagatttaaaaatgagaatgtccaagcaatccgaaaaattctcgtagatggccactaacagaccaatgtagctcatgaactcggtataactaaaaaagcagtaaatcaaatagttagtaaagcatggcagacacatatcaatcatggtaaacgcccaaaagactggacaagtattagcgtcacgctgccgccagacatggccgaattggttaaggacatggaacagaaagcacgagcaaacctgattaagaggtagttattggctatcttgctaaagaatggttttattatcgttaacattcatatcagaactaatatatgtcgtaattaaccgcagcaccttttcctatagaaacatcacttgcaattaggctgctatagttgagcatttttttcattaatacgtacgttttcatcaattaatactaattctggttttggttggattggtggagatgccctagttctgacgggtaaggtattaagttattctggttatttggttacttttctaatgcttgttgaaactcttgcgccagagcagccgctgcttccgtattgtagtgccgaacggacaacgctggggcggaacgcatgaacatgccccagcatctccacccacccctccagcaaaaccgtatgccgtacccatgaccggcaccatatgacttaaagaccttgttcctacgatctccagggcctgcaaacacgatgtcaagttacccacaatcaaagcaaataaaagtgatgaatcatgacatcaagttttctcgaaactggagcaagacattgatcctagaaaacaggaactcgacctcattacgggatttatacatcgtacgatcatatgcccaaggcacgatctcacgtgtacaacaatggcaggacaggaatgaagcccccgtcaagctatgcttgctggaatgactcgaaggctcgatccagcatgcccagctcctcacattgagcatgcgtgcttgcaaattcatcggactccagcacaaccacacatcagcatacaaaacaagggatcgaagaatcctatatgccgtccctgaaggtgagtagagacacgatcagcccttattgggaagggccttcgctacaagtatgatgcaaaataaaactaaggatgcaacacatcaagctcaggaagcattattacgctttcctggtcatttggatcactacgtgcgaccagtacaacggctggttcattagaattgttataaggctgatgtggtacaccagccggtatgtaaaaaaagtcgcccggcacaacagtcgcatgttcctccaatcttgagccataccagacgtgcgatacacccgtgagcgcgtagatcgctgtttcgtggcccgcgtgcatgtgggtctttgcttttgcaccaggagcaatggtgacaagctgaagattgattaccgtggcaccaacggtctccgcagaaatcccaactgcatagtcaagcccttgttttccgatgaaaggctgctgtgcacgcaacaacctgcaagtagaacgtgtttctccaaggtgagccttcatcaatgaactccgcagatgtgagtatcgcaacgattgtaaaaagaaaaataaaatataccccgaacaaacaggataatcattaaccgaaatcctgttgcaagtagatgacgcaaaaagaaatggatagcacataataaaaatcaccgagccattatcctctgccaccacgtgactcatgtgtcgttccagcaacaccaagcgctcactgattaccaaaagcgttatttaacggtgccaagtaactgcaaatatccgtgacgtacagatacatcccacccgctttacagaacgcgtacagctttgactgccttatgatgccaaacccctagcatgcagcgagtcttaacagccactcatcccggatcgttggcaacgccatgcggaacgtgcccagccgccacactttggtgctgacgggcactgtcaatattgtgctgcgaatcgtcgaagaaaatatctgccccaaaggcttccagaaatggccccttatgccgtccccccaagaacagcgcctcatccaaacgcacgccccactcccgcaaggtacggatgacccgctcatgcgccggcgctgagcgcgcggtgaccagtgccgtacggatcggtgaagcttcaccggatgggaatgcagcctgcaacgcttggagtgcggacaagaaattacggaacggcccaccggttaacggctcacgtgcacgttcacgctcatagcgaccaaacgcctccactccttgctcgcgagacatacgctccccctcatcaccaaagatgactgcatcaccatcaaaggcaatgcgcagttgtactggcaaggaactgcactcgttgtcggcaacagccgccgctgcctccacacgttcacctaacatgcggggcatgatcgttgctgcagcaataccatgctccaacgcacgccgcactgataccgggttggccgatagaaacaaatcagtgccaaagggtttgacataaggccatgttgcctcaccagaggtgaaagtggcacgcacaattccaagaccgtagtgctgaatggaattgaagatacgcaagccagtgtcagcggaattacgggacagcaaaatcacctcaacccgcggcatctcggccagcgctccccgattcaatgccagtaacttacggacgacggggaacgcgacaccaggttgtaggacatcatcctcatgttcacgttgatagtgagcatacgcatcgacaccatcgcgctcaaacaacgcatgcccctcttccagatcgaacaaggcacgtgaagtcaccgcaacggtcagcaacctatgagaatgatcgggcatatacaacgttcatgatgtggaaagaacaactcaaacattcccttctccctgacctggcatcctggccagagaggcgagaaatggctcatacagcaaactgctcgctgaagatacgctcctcaagattatgctcagggtcgaacagcaacgtcacgcgctgctcggtcgattcacggatcgtgacttcaacaacatcgcgaatttcatgggagtcggcggtcacactgacgggacgcttataagggtccaatacacggaaacgaatctccgtatcggccttaaggatcgcaccgcgccaacgtcgcggccgatacggagcaatcggtgtcaacgccaacgtatgcgatcccaacggcaaaatggggccatgtgcggaatagttgtacgcggtgctacccgccggagtcgcaacgatgacaccatcaccggtcaattcatcaatccgagtttggccattgagatcaatactgatatacgccgcctgatgcgtttgacgcagcaacgacacctcgttataggcaagtgattcgacactgacaccagattctgtctgcgccatcatctgtaacggacgcagtttggccggttcagcacgctgcaagcgttccagcaggtcatcatgatattgattcatcagaaaaccgactgaaccaagcttcataccgtacaccggcttgccgcttgccccataacgatgcaaggtccgcaacatgaagccatcgcctcccaaagcgcacagcacatcggcctcttcaatcgaacaatcaccataacgggccatcaactcctggcgtgcccgttgtgccggttcagcggtactggcgaggaacgcaatgcgaggtgcggcagtcatcatcatctccaaagatcaagcccttcagcatactgcaagcacacaacccatttagaattaaagagcacagcaacggccacgcactcaagcaccatgcgcagcaagctgccctaaacgctgtaccgcaaccgagagcgttgggtaatccagcgtcttctgctcgttcaattcagccaacatcgacagtgtgaaacacaaactgctgtcgtcacgcccaatccattggtcaaccttttcctcggcgctcattccaggcattgccaacacatgcccggacaaagagcgctggtgcgctgccaactcatcacgcaacacgccgcgcgcaatcgcctgccagcggccagtcacttccagtgcatcaatgtgtgcaaacaaccagggcaaccccaatgcagcacccaaacagaaatgcaccttggagacttccacggggtgaagcttggacgtatgtgctaattcaatcatgtcaaacgcctgtcccaagaaacacagttcagacagttgctgggccaacgtctgggaaagccccttctccttccagtcctgcaaactagcctcgtacgccgcacgttgcatctctggcaacacggcagccaccggacggatagcgttgaacgccccgcggtaacgctccaccaccacagcaatatccggcatctggccaggacgcaacagcaaccaacgcacacatgaccactgcaaacgccagatcacctctaatgcatccatctgcaccgactcggggatccgtccatccaatgcatcaatctcagcccacaaggcacgcacccccaacgtctcgcggctcatcgtgtaggctttggcaacctcgccaatactgcgccctgtgtcctcctgcatccgcatcaggaacgtcgctcccatgcgattaatggtcgtattcgtgaccgccgtcgcgatgatctcgcgtttcaaacgatgctgctccatcacatgggcatacgccttctgcaacggctccggaaagtagcgttgcaattcctgtgacagataaggatcttcaggcacatccgatgcaagcaattgctgaaatgcaaccaatttggagtacgacagcaacaccgccagctccggccgagtcaaacccaaaccacgtgccttacgtgctgataactcagcgtcggagggtaggaattcgatctgccgatccagcaatccctgtcgctccagggtacggatgaaatgctgtttggaaccaagacgcttgacactcatccgttccatcaagctcaacgcctgattttgacggatgttgtcccacaacactaactgcgccacatcatcagtcattgacgccaatagcgcgttgcgcgcatcgaaactgagcgtcttggcctgcacgacatcattcagcagaattttgatgttgacctcgtgatcagaggtgtctacgcccgcagaattgtcgatgaaatccgtgttaagcaacacaccgcgctgtgccgcctcaatgcggccaagctgggttaaccccaaattgccgccttcaccgacgaccttgcaacgtagctcaaggccattgacgcgtagagcattattggcacgatcaccaacatcggcatgcgtctcgctgctcgccttgacataggtaccgatgccaccattccaaaacagatccacgggtgctttgagaatcgcgctgatcaacacattcggagagagttgcttgattcctttatccaaacccagcacctcggccacctgcgggctgatctggatcgacttcaaagtacgcggatagatgccgccgcctttgctgatcaacgtggcatcgtaatcggcccaactggagcgcggcagcttaaacagacgctcacgctcggcaaacgagagagctgcatccggcatcgggtccaaaaaaatgtggcgatgatcgaaggccgccaccaaaaaactatggcgcgacagcagcatgccgttaccaaacacatcgccagacatgtcaccaacgccaatgcaacgaaaatcttcattctggcaatcacgcccaagtgcacgaaaatggcgcttgactgactcccaggcaccacgggcagtaatgcccatgcctttgtggtcgtaaccgaccgatccacccgaggcaaatgcgtcacccagccaaaaaccatgctccagggccaaacgattggcgatatcagaaaacgttgccgtgcctttgtcggccgcaaccaccagatacgggtcatcctgatcgtaacgtaccaactgcgctggcggcacgatctgaccatcgacaatgttgtcagtcagatccagcagacattgaataaacagtgtgtaacatgcaatgccttcggcctggatcgcatcgcgatcggcaacggaaggcaagcacttcacgaagaatccgcccttagcaccgactggaacaatgacggtatttttcaccatctgtgctttcaccagaccgagtacctctgtacggaaatcttcacgccgatcagaccagcgcaaaccaccacgagctaccggaccaaaacgcaggtgaatgccttctacacgggggctgtaaacaaaaatttcgcggtatgggtgcggcttgggcaaatcctgtatctgcgtggaatcaaacttaaagctgatacaggaacccagcggcccctgcttcccggtttgataataattggtacgcaaggtcgcatcgatcacaccaacgaagctgcgcaggatacggtcttcgtccacattagctacacggtccatcagcttaagcagcaccgcatggacagtgtcccgatagacgtgacgatcactgaaactcgcttcgagcattggctccaacacttttaaaacagctgtatcgccatcagccagggccgttaactgcactcgccgctgtggttgattgtccatacatcgtttgggggcatcgtcaatcgtcgggttgaaacgggcgtcgaacagttccaccaacactctcgccaacagtggatactgtgcaaacgtcgcttcaacgtaactttgtgagaacggggcgccagtttgcagcagatatttgcagtagccacgcagcaacgccacctgccgccaatctagaccggcggcaagcaccaagccattaaagccgtcattttcagcattgccatcccagatccgcacgaacgcttcaacgaaagtcattcccacagcagtaacatcaatggcaccgacagcagattggacttcgaaatcctggatgcacattggaaccggggcaatatgcaaacggtatagccgttcggaaatcacccgtaacccgagattctccatcatcggtaacacatccgagagcgggataccgtccaactgacggtacagtttcaaacgcaacccaggtgaaccggcacgcggtaaggcatgcaagctcaaacgcagatcgtcaggactttgcaatgccgccaaatgctccacatccactgccgcagactcaatggaagactcttccaagtaacctgccggcaacgcacggccatagagcgccgccatgcgcaagccaacatcctcgccgtgacgcgttaccagcacttcacggagcgcatcttggccgttacgcagtaaatgcgccacacgctcttccaatgcctgggcatcatcgggttccaacacatagccactttgtggcctgatgatgagatgcaattgtgccaatggtgacaattcattcactatcactgaagaatcgatgtattcgccatgcaaaacatccttgagcaatgcctcaatacgcaaacgcgcatcctgattgaagtactcgcgcggcacatacaccagtgctgagataaaacgctggtacttgtcgcaacgcaaaaataaacggctgcgcacccgatgatgtaacccgagaatacccattgcagtgcgatacagtgcttcatcaccggactgaaacagctcttcacgcgggagcgtctctagaatgtggcgcaagagtttgccgctatggctgtccaacgtcaggcctgacctgttcatcacgtattggtaacgctggcgtacgaacgggatctcccaagggcggcagtaatatgcactggaggtaaacaaaccaaggaagcgccgctcaccgatcatgcgtccttcagcatcaaactccagtacaccgatgtaatccatatatccgacccgatgcaccggagagcgtgcattggtcttggtcaaaatcagtgcatcatcttggccggcagattgactcagacggtaagctgcaaaactcgccatcgggcgtggcggtgacacatcctgggcacgcatcagtcccaaggcagtctcctgcaacgatgccaacacggcttctgcaccatgcttggcaacgctgtattcacggtaaccgaaaaaaataaaatgatctgccgcaacccagcgtagaaatgcctgcatctcatgccgcagtgcctcgctcggcacacagcgcatgtccatagcgtcggctaatctcagcatgtgctcacgcatcgcacgccaatcagtcacaacggcgcgcacctggtccaaggccttgcgtattgccttctcgatcaccgccatttgctcagccgactggcggtcgatctctagcaccatcagcgactcggcgatcccctcacccaccgcaatcagcctattttccttgtctcgagtcaattcgattaccggatgaaagagcaaatgcacaccaatgcccaactccgccaaagtcatgatgactgtgtctaccagaaatggcatatcctcgttaacaatctgcaacatggtgtgggagctatcccaaccgtggacatgaatcgcaggtttacacgcacgcacgttcaccgtgccactgctgcgtacacgtgcaaactccaacatgcccatcaccaatgcagcccactgttccggcgtacgcctggcaaactcatccgtttccatccggcagtaaaaagcggccccgagccgctgtacatccgattgcatggacaccggacactgctcgcgcagtacggcaaacacagactccaggttaaccatgcatctcggctcaacatcgccgactaacgattgcttagcaggatccttggcaggtcctttgaccgatgtcgataaagacttctttgagaccatcactcaatcacagatgttcattgacaatattaagattgtaacgacacgcagattagatcgccttgtgcatagccagatagcgtagggtttaaaagcatgatctggccatgatcactaagaccacctcgcgttttgaaagccgtaacgcatgtacttgcaccactagcgaaagtatccgagcaccaacttacgcactgttggagatgaccgacgcaagcaacaaaagcgccgattcatgcaatatcattcgcacattgctgctctgcctacgcatgccagcatcatcactcatctgtgaatgaggtgcgggccgctctccgtcagtaacatcaggattcgataaaaaagtgcatgcttcaaccataaaacaccaagacactttaaaattcaggaatccatcggcatctatagcgttaccgacccgctcatcaacccagcaaaacgctttagcgcaatcatgacttccacagcatgggaatctccttaaattttaaagttgaatctggcatccaaagtgcaccaatcgcaaggaagatatcgacctattcaccgttaaaaatgaagagccaattagatatgaaatcaaactgataggtatagttgatccctgatactcattggacttggcaccacatcacatgcaaggctttcgcgtcagtatctaccgatcaactgcctggaaagcgctccacttcgggatcgccacaatacaaacggagaatttttcagaagcatgcaatacataaataaaacgtgtctgcaacaaccagggcatatttctgtgtcagatcaactcacaacctcggagccattcccgatgactgtcccgttacgcgtactcggcttggcctacaccgtcttgctagcacttaccgcatgcagtaagtccgaacagccgcagatgccaacaccagaagttagtatcgtcgaagcaaagccgcaaacaactcccatacaacttgatttagtcggacgtctatcggcataccgctccgcagacgtacgcgcacgcgtggctggaatattacaaaagcggatatacaccgaaggcaccgaagtaaaagaaggtcagccgctgttccaaatcgaccctgcgccatttcaagccacgctgttagaagcacaaggccgtttagctgcagcagaagccacgtataaaaatgccaagatcgtcgctgaccgcgcccgccgcttgtcccctgagcaatacatttcgcgctcggatgtagacaatgccgaggcagcagaacgcacggcagccgccagtgtcgaacaagcacgcgccgcaatgcagaacgcacgcatcaacctcaattacgccaacgtcactgccccaatcagtggtcttgctggccaacagcgagttactgaaggagctttagttggatctgggagtagcaccctgctcacgaccgttgatcaaattgatccgttgtacgtgaacttctcaatgagcaatgatgagttgatgcaactacgccaagcacagcaccagggaagtgtgcaattgagtagcgacaatacatcgaccatcgacgtactcctcagcgatggcagcaaatatccacaccaagggatattggatttctccggagcaactgttgatccgagcaccggcacagtatcactgcgtgcagtgcttccaaatactgatcatctcctgctgccaggagcctttgtcacatttaaagccaacctcggccagcgcaacaatacgatcctgctacccggcgcaggggtgcaacgtgatgcgaacagcgcttacgtcctggtgatagacaaagatggcaaggtcatccgcaagaacgtgaccacgatcgggatgaaagataaccagtggttgattactgccggactctccaacggagaccgtgtgatcgttgatggtctccaaaaagtcaaagaaggcgctccggccaaggccatcccctggaaaccagatctcatttccagcagcgcacacgcagcagccaagacacccactcacaccgctaagaccgaacaataacggacgcatccaccatgccaaaattttttattgagcacccaatctttgcctgggtggtggcgatcctgatctcacttgcgggtgtgatctcgatcttcaaccttggcgtcgaatcttacccgagcatcgctccaccccaggtgaccatcactgcccattatcctggtgcaagtgcagacacacttgaaaagtcagtcactcaagtgatcgaacagcaactgaccggcattgatcacctgctgtacttcagttccagctcagactccaatgggcaagccacaatcaccctcacttttgaaagcggcaccaacccggatattgcccaagtacaggtccaaaataaggtatcgctagccactccccgccttcccagtgaggtgacccagcaaggtgtggtggtggctaaagctaacgctggcttcctgatggtggtcgcactacgctcagataaccctgcattcgaccgagacgcattgaacgactttgtcggcacacacgtgcttgagcaaatctcgcgagtgcctggtgtcggcagcaccaatcagttcggtgcacagtacgcaatgaatatctggctaaatccagaaaagctgcagggctaccacctgtcggcaagccaggtgtacaacgcaatcagtacccagaatgtgcaatttgctgccggttcaatcggcgctgatccggcaccggccaatcagagcttcaccacaacggtcaccacaaaaggccgcttcactacgcctgagcaattcgaaaatatcatcctacgtactaatagcgacggcagcacagtgcagctgaaagacgtagcgcgcgtcaagataggcgcagagagttatggcattgactctcagtacaacggtaaacccgctggtgcctttggtgtacaactgctgcctggtgccaacgcgttacaggttgttgaaagcatacataccaaaatggacgagctgcaaagcacgtttccgcaaggcgtcacttggttcactccttatgaaagcaccacttttatcaagatatcgatcaaggaagtggtgaaaacgctggccgaagcgattgtcttggtcttccttgtgatgctgatctttctgcagaacttccgtgcaacgatcatcccgaccctggtgattccggtcgccttactcggtacctttgcaggcatgttagcgattggattcactatcaaccaactcaccttatttgcaatggtgctagctatcggcatcgtggtcgatgatgcgatcgtggtaatcgagaatgtcgagcgcatcatgaccgaagaacatttggaacctaaagccgctacgcagaaggcaatgacacaaatcaccggagcggtgatagccatcagcattgtgttgacagcagtatttatcccttctgcgatgcaaccgggggccgctggagcgatttacaaacaatttgcactgacaattgcgatgtcaatgggtttttcagcattcttggcgctcaccttcacgcccgcactatgcgcgagtttcctgaaatctagccacggacaaaataaaaattggatcttccgtacctttgagaagtactacgagaaactctcgcaccgctatgtccgtctcatcagcaacacactcaagcgtactccacgctggacagcattttttgcggtactcgtcgtcctctgtggctttttatttacacggatgccttcaagcttcctgcctgaggaggaccaaggtttcgcgctagcgattgtgcagcttccaccaggagccacaaaaacgcgtacgaacgaagtattcgctcagatgcgcgctgtattggagaaaatgccgtccatcgaagggctcatgcagatcagtggcttcagtttcgttggctcaggtgaaaacgttggaatgggcttcatccgattaaaaccctggcaggaacgtcaggagaccgccgatcaactgattcagcaactgaatggtatgttctacggcatcaagggggcgcaaatctttgtggtcaaccttcccaccgtacaggggcttggccagtttggtggcttcgatatgtggctgcaagaccgcaacggccttggccacgaagcattgactcaagcacgtaatgtggtgctcggcaaagcggcacaacgccaggatgtgatggttggtgtgcgtccgaatgggctggaaaactctcctcagctgcaattgactgttgatcgtgtgcaaggagaatcgatgggtctgtcaaccagcgatatctacaaagcaatccaactgatgctggctccgacctacgtaaacgactatttctctgaaggccgtattaaacgcgtcaacatgcgtgccgatgacatgtaccgcaccagtcctgattcactacgcaatttctacacacccagcagttctgctaccgatgccaatggccaaccattgatgattccgctcagcaacatcgtaaaggccgattgggtatacgcagcaccatcgctcaatcgttataacggttattcggcaatcaatattgttggaaacacagcccctggtacatcatccggacaggcaatgaaggtgttggcaggtatcgttaacgacgatctgccacatgggtttggcattgtttggagcgggatgtcctaccaagagatcctcgctggcaacgcagcaacgttactactggtgttgtctgtcgtcgtggtgttcctatgtttatcagcactttatgaaagttggtcaatcccggtggctgtactgctgatcgtgcccatcggtgtactcggtaccatcgtgttctccatgcttcgcggcttaccgaacgacctgtacttcaaaatcggcatgatcacggtcatcggcttggcagcaaaaaatgcaatcctgattgtggaattcgcagttgcacaacgcgcccttggcaagacattgcgtgaagcgaccattgatgcagcacgtttacgcttccgcccaatcctgatgacatctttagcattcatcctgggtgtgctgccgctagcaatctcaacgggtgctggcgccaacgcccgacatgccattgggactggggtgatcggcggcatgacgttcgcaaccatcctcggggtgatcttcatcccactgctctttgtcgtggtgcgacgcaccatcggcgataggcttgatgaacaatccaaggaataccttaaagcgcaatcaagcagcggccaccttcagaatcgctgattctggtcgtttgaagagcactaagaaggaagccctggtcataagaccggggcttcgtgctttctggaaagaaatgaagcctacaactcgttgcgcagacggcggtaaccctcaacaagccggttattggtctgcgccacatcttcagaaaactcggaggcagccacagtgactcttggtattctgccaaggtcggtacttgacccaatgcgctcggtggaagggacgtagaagccaggaggtaaatcacacccatcaaccacagcattgtgccgaacgacgcaaccatcaccaacaacacagttgaacaacacactgttgaagccaatgaacacacgctcaccgatcgtacacggcccatgcacgatcgcccgatgcgcaattgaggtacgtgcaccgatcgtcaccgcggcaccagacttagaatgaatcaccaccccatcctggatgttggcaccgataccaatacgaattggcttaatgtctccctcaaccgtagtctcatccgcacggatgactgcatacgggccaataaaaacaccagcctcgacaatgacacaaccacataagatggcagtaggatcaacaaaagcactttcatgaacatcgggcaggtctccccgcggatttttacggatcataggacagcggttgtggtgggaattagaaagggctacttcatgcctgttgagttgaacatagatcagttcgatcactcatctacggtactggcaaccgcatcgtgaggatgcaagctctccaagtgcctgacatgtaccctgaaagcggaataatggattgctaatccgtgttgcaaacggcgcgtagcatcttcgacgtacatcaagttagcgccattgagacgagcaaacgcctgttcatcgacacgtcgtaccgctgcctgtacaggtgtggacaagatacgctcagcacagtccactaatgcaggaagccccaattcaactgcctgctcagtgagtgcaacctcaatacgtgccacactacgctggctgtgtggtgtggcatacgaaccattggagcgcaaccaatcagcaacagtctcaggcgacaatgcagacacttccacgtgttcttgtagaaatgcatcggccaacatctgccgcgctaatgccgccgaacaaggacacgtcgacgaatatccgacctccacacacaaccagaattggacgtgcacagcagaatattcggcacgcaaagacaccggatagccacgccaaccagacaaatcgttactcaccaacgccggcacacgccgcagccaatcgaaatgccaatccacacgcgcagcggtagacgcacaatcagcatgactattcaccatcgcagagagcaatccgcaaatacctaccggtgtcagtggctcaaccgcatgcgtatccaacaggcgatacaagcgcgacatatgaatccctttgacttccatcgcaggtaaatcaatctgtgctctggcacgtccaatcacatgttggccgccatcggcagtcgtcaactgtactggtactacgattccatccataccaacccagcgcaacggcgcagcgactgcggggctgtcatgaacagcaacatcaggaatagaagtggacatcattgagaactcgcaacatgcatcatggagaaaatctcacctgcacaagccacagatcgaacctcgatagtcgtcgatatcacacatgaaaccgaaatacgcacggacatcccatctcaaccatagataccgtaattcaatcggtgacaagaaataaagaacaaaacgccgcttgaaatatgttataaaataacataactaatccgggcaaatactgtcaaacaccacattttcacggctgatcatctgtgatgaatccattaattcccaatacctacgaagcttggcgtcactgcatcgaacaccgctgcaacatccctctgactcacacttatattgaggaacgcttggctgcattacgtgatccgaacaatttccacactcagcaattcatacgatgttggggggaaacacatttacgacaaatcacgcattggttcacgttagcgattgagtccgaacagcacacctctccccatatcccgggccaaatatcagaaaaataattgcttgcaccacaaaagcatggttttctcaaaaaatgatactgcctgcttacatcagcaccagatatctggcatctcctaatactgtatttatgttttcacccatgatctaaacacacagggagaccaaacgaacacaaactgtcactgcatccaatggtttacaaaaagcatccacacacaaaaaacgcgctacaaaaatcaacagaacacctgcgcataaaaaaccccctaagaaactcttagtcatcgatctcacctgtcttgcctagcacacttattacgccctgcttgcgtcccttatgactcagcacccctgacttactcgcacacaaaggcaatgcacatgacatgaagcttgccgcatattggagcagacgcaacgctagctcttgaagttctgaaattgcagcacgtgtagatccctgatagcaccaaaacacaatcaaaatgtaacaacatcaaggccagcaaacaaaaacaacctggacaaaagctgagatatctacatagatacccacccgaacgcactcgaacactaaaacccgaacccaaaaaacactgcatccctgcaaagaaacaggcaaaatcctccgaacaacaacactcctgcaagatacatatctacgacgcaccggcttgtggacacactacaaacatgtgcgactcaacagcagcccgccgccccattcatccctcgagactggaacggcataacggctccaaagagcctgaacacgtgcctggcaccagatcggtagatgcaatgccatctacccatccaccgaatgtcatcacaactggctatgcaaccgacaacgattaactgatgaatggtctctttgatacttctcatattcggcgcgccttttcccgcgcggcccgcagctacgacaccaacgccatactccaacacgaagttgaacaacgtctactcgaatctctggactatctcggcgaccgcataccgcgtgtaatactcgatgtaggagccggcaccggacgtgccagcatcgcaatgaaaaaacgctggcctaaagcacaagtgatcgcattcgatcaagcaatgccaatgttgcaagaagcacggaaacgcagtcactggtggaaaccattagcccagatatgtggcgatgcacgcaccctgccagtggcagacgcgagtgtcgatgtcatcttcagcaacctatgcctacagtggatcgaagatctaccaacagtattcgccggcttccgccaagcactacggcccggcggcctactgctgtgctccctcttcggcccagataccctcatcgaattgcgcgaagcatttgctcaggctgatgcagtaccacacatcagtccttttccatcaatgccccagtgtggcgacgcacttgtattggctcatttccagaacccagtactggaccgcgacctattcaccctaacctacgacaacctatcagccctgatgcgctcgttgcgtgcgatcggtgcaaccaatgcattgcaagagcgccgtactaccctgacagggcgtggccgcttcgcagccaccgctaccgcctatgaaacactgcgcaacgctgataacaaactcccaagctcctgggaagtcatctacgcctgcgcttgggcaccaacatcggacccaatgaccagagaaaacaaccatgaaattgccagcatcccaatcaactccattccaattcgccgccgcaattccagctaagtagcacgaccacaaaacccgctccttacgctacgatcacccttctcatcaatactacgatacgtgctctctacatgatcaaatggtctttgatagtcctgtttgtcgcatcggtcctttacacccacttcagaggccgtgttcgccatcgtttaagacgacagctatttgaccactccaccttcatggcacctattaatgcactgatgtacctatgctcacgcatacccaccacaccgttcatcgaccccgccaggttcttccccgaactgatgcccttgcgcactcaatggactacgatccgggatgaagcactcgcattacaacgcatacagaagatacgagcggccgagggccataccgacgcaggattcaattcgttcttccgacgtggctggaaacgcttctacctaaagtggtacggcaccacacatccatctgctatcgcactgtgtccaaaaaccacagcactactgaaaaacatccccgcaatcaaagccgccatgttcgccgaactgccgccgggtggtgacttgcgtccacaccgcgacccattcgcaggctcaatgcgtctgcacttaggattggtaacccccaaccacacaagctgctttatcgacgtcgacggtgagcgctacagctggcacgacggcgaatgggtcatgttcgacgagacctacatccactacgcacgtaacgacacagagcacaatcgcatcatcctattctgcgatatcgaacgcccaatgcgctggcgctgggcacaagcattgaatcgcttcgttgccagacatctactcgctgctggcacctcacctaatcaagcaggtgaccaaaccggcggcatcaaccgcatgttccatcacttctacgcattacgcctgaaagcaaaagcactgaagcaatatagcaaccccctgtaccaaacgatcaaatggagcctgttcaccctatttgtcattggcatcttcctattgtgaaccacagcacgcgcagcccacgcatactgaaaaaaacacactaaactgcgattgatgcaccaccttcaaaacattctcatcggcactttccctcatcccctcatacttaactcagatcacataacgacgtaagacacacaccgcaccataaaaacatgaatatcggacaatgtgctctcaaaaaatctcagcatggcccctaaaaaaatcccctgaaaaaaagcaagtcatgattcctacagcttaaagctgcactgtgatttcagaagtctgggaaagcattgagggaacagtggcgtatgacgtattcgaatagaactccacctactcaattcgcctgtatcaccaaatcacgatgaaaaaagtacacctcttgcagcaaaaagcgccaacgggtgtgcaaactgcggaaacgcgtgctcggcgtcgccgaagccaacgcatcaatatccagctcccgacacagtcgtaacgcacgtgccatatgtaacggatcactcaccacaatagcgcgtcgcaacccataaacacgcatgagctgacgcgcctggatcaggttctgacgggtggttcgcgaaacagtctcgataagaatcgccctgggtggcacatcgtaacgcaacgcataacggcgtgctacttgcgattcagcaaagcgcgcactgctcccaccaaagccacctgtaaagatcaacgtaggcgcataaccgtgctgatacagatacaaaccatgacggatcctttcctcaaacacaggtgatggcttagcgtcataggcagcagcaccaagcacaataatcacatcagatgatgccgcttggtcacgttgcccaatccagacaatccaaccagcgactgccactaaccagaagaacacgagcaccaccacaacgcagatccattgccaccagcgatagcctgtaatacaacgactcaagacaccaccaaaacgctcacgccgcagatgaagaaaccggcactgcacccacatccagaaagacgtgcagaaatgtctacatgacacaaccaagcaacatcacagcacagtgctctgaactcaccgcccagcccgcaaccaaacacatatgcgtgcaggagcagcatccccgtcaagacccctatacatgatttgaccgacaaggcaaaagatgaatagaacataatcactcgagccaacgggattcacgtcgccgccgttaagcaccaccgccacgacaaccataaccgacaatgaagaataacgagatatcaatgcaattccatctatttttaaggtccaatgttattcagactgaacggccatgcaccctttagatctgcagaaatacccttgcacaaacatcgctccaccagacattttcaccactgtggtaacaaaactcgaacaccaagcaccaagcaccaagcacaaacacatcacccaacactgtcatatctacttagaaacagcacccggacacacacatatcaccgcactgcccccatgaatttaatgccccactacgtcactatcgaaacaagaacaccccgatgaaagcccgtctgttcctccccatcctaatcatgtctgcgatcagtggctgcgcaacgtacacttatagcaatggctactaccacggcacaccaacggtggagtaccactacccaccaaactattactacccccacggctatgggatgcatgatttattcaattatccgataccacccatctatccccgagacttctatcgcacccacattcatctcccctactggcaaagaccgcatcatgacccaagccgaccactgccacccaaacaacccataaagcaggagcagcccaaccatatcgaaatgggattacgtgacaaacaacccatttagcgcaatcagcgcttgcatcgcagggggcattacctacatcgtgaacgtgttgtgacctccagcgtctgtttctgacttggtgttactgagagtttaatgctggcacccgacagggaaacttggatcccccctattccgacccctgtcgggagtcggcacctcatgcagcaaaagccttcttatgaatattgctgatcaagacttgatgttgctctgctcagaactcgaattaatgaagatatgcccacattgtgtggacaccctgaaacatcaaaggctggcagcccgctgacctgccagccccttgcttccccaccgcacgcgtggccagcccctattccaatcccgacctttgcgcctgtagccgcaatgctgcggcaggtgcaacaacatcgacagcataaaatgtgccaactctaaacaaggcatttctgaaaatcacacaaaacacataaaattccatccaagcttcctcccgactccaagcagccacttcgagtcatcccgcccatccttctccactaccgccattgcacacatgactgattccttctatggctacgacgttatcgtcatcggtgctggccatgccggtagcgaagccgctctggctgccgcacggaccggagcacacaccctattgctgacccacaatattgaaaccatcggtgcaatgagctgtaacccagccattggcggcatcggcaagggccacctggtcaaagagatcgacgcactcggcggagcaatggcacacgccgcagacgccgctggcatccaatggcgcactctcaacgcatccaaaggtccggccgtacgcgcgacacgctgccaagcagaccgcgccttataccgtgccgcaatccggcagatgattgaaggccaagcacgcctcaacatattccaagccgaagtggacgatctgctgtttgaaggggacaccgtatgcggtgcgattacacacactgggttgcatttcaaagcgcctgccgtcgtcctcaccgccggcacattccttgctggaaaaatccatatcggaccaacccaatacgccgcgggacgcatgggcgacccgccagcaaccatgctagccgcccgcctgcgggaacgtctattcacagttgcacggctcaaaacagggaccccaccacggattgatggccggacgctgaactacacagcgatgcaagaacaaccaggtgacgccccacgccccaccatgtccttcatcggaaactcagcttcccatccccctcaagtcagctgctggattactcaaaccaccgaacgcacacatgagatcatccgggccgccctacaccgctcgccgctgtacagcgggcaaattgagggcgccggcccacgctattgcccatcaattgaagacaaagtggtgcgcttcgccgagaaaaatagccaccaaattttcgttgagcctgaagggttgaacgtcatcgacatctacccgaacggcatctcaacctcattgcccttcgacgtacagttagagttggtacgcagcatccgtgggttcgaacaagcacacatcacccgccccggctatgccatcgaatacgacttcttcgacccacgcggactcaaagcgtcactggaaaccaaagcaatcgctggactgtttttcgctggacagatcaacggcaccaccggctacgaagaagccgccgcccaaggcctgctggctggactcaatgccgcacgccatgtgcgtgggctatcctcctggacaccacgccgcgaccaagcctacctgggtgttctcgttgacgatttgatcacccatggcaccaacgaaccgtaccgcatgttcaccagccgagcagagtaccgattacagctgcgcgaagacaacgccgacgcacgcctcaccgcaatcggccgtgacctaggcctcatcgacgatgcacgatgggcacacttcaacgcgaaacaggaagcagtcgcgcgtgaatgtgaacgcctgtccgcgttctgggccacaccaggcaacgccctaggtcgtgaagtcaaagaaaccctgggagtgacgctcagccgtgaaaccaacatcattgacctcatgaagcgaccagaactggattacgctgcactgatgcgcgtcccctccctgggtcctggcgtcgatgatgcccaagtcgctgagcaagtcgagatcagcgttaaatacgctggttatttaaaccgccagtccgaagaaattacccgccagcagcgccacgaagcaactgcaatcccacttgaattcgactatgccgcagtgcgaggactctcgacagaagtcttacaaaagctgcaacacatacagccacagacagtgggtcaagcgcaacgcatcccggggatgacgcctgcagcaatctcgttattactggtacacctggaacgcatgcgtcgcaaccgcgtcgcctgattccaatcgcatcaccacacctaccatggcaaatagctatgtatcaccgaggttgacgaagcattgcacccaccaggctgtggctggagagactccctacagtagctgacattacgccaggcaggacgcaagccgaaatcatcctcaatggcatgtgctcggcagtaccgcaacgcctgtaagcagttcagacactagctaagatggctgctgcagttgcgtcaatcttcgaagcacgcccccacgaaaaccaacgcacaggcagccgctcggtaatgccactgctgccgtcctgcttaatcgcgttatacatcgagcgaatgactggacccgcccgccacgcttccacaagctcatcaattaacgggtgcgtgtgaacacacatgagcaagataaacaagcttgagcacttgcagaggcgtgagcgccctcccctcttgtgaggccttttgtaaaaagtaattcgcgatgttggttggcgagtagggccttcccatcactcctcattggttaaggtaagggcttcccaaaacaccaggaagtcccccctctaaatagagtccgcagagactggcgcgcacagccattaaaaccctgcattctcgtagaactaaagtagttggtattgcatctatgttgctgattctgctaatgtcctccaaccttgcaaaggttgaggtcgcgagttcgagcctcgtgtcccgctccagatacaggtgaatcaccgtactcgcaagaagcatatttccgatacaaccacgttctcaggcctggtggcagagtggtcatgcagcggattgcaaatccgtgtacgccggttcgattccgacccaggcctccaatacatcgtggtattggggtttttcaggttttttgctaactgcaccccttgctttgcaagggatgcgttttggcgttcatcaggccgcaggaggcccatacaataaattcggattgactgcgactggcctacttgcggacgacacgcacgcgttttattgaaaaccacaatctaagtcgccgagcaaccgcagcgcgtcgcgttcgtgcaggcagatggcacaacgatcatagggctagatattagtacgaaacgatgggcaaccgcgtttctttctggccaaaatccattaagtattgaagataaaagcgatttcgtactcggcgcggcgctacgcaattcagcaaaaaacgatacgacgcagcggcttgcccccataaaaaccgcctaaaaggcggtttttatggctttatccgagttaaaaaaggccccgcgctgcactgggggcacagagaggggcaatatgcgcatcacgcagcgttagtatagcgaacataacactattcctgcacgtaaaccgaaaaatgcagaagcagcaactccacattacgtggcatcgctacgtcacgccgcgtgcagctccgaagcggcttgcaacttgcccaacaaccagtcgtagacgccgtgccacgtcatgcggtaggcagcctcatcgcggctaatcgcggcggcccggcagcgttccactgccgccgcaggtggtacaggttttttgttttccacccacacgcacgaagccgcgaccgtgacacggacggcaatcacgcggctgagacaactcacgcaccgccgccatgaccaaggcaggaaacatctgcagcgttttacgcggccaagccgttgtttaaagcgtttccagaaggacgaccgcacacgcggtgcgcccgtcacggttcacgtgagccggatacaagcttcaacaattccccgtgcagaacagggttcacgcgcagtactgaactgcaatgcgcattatcgatctgttgagacaggttgatgatgctccatcagccctcgtatcacgacctcccagagcaacactgcattggtcggtatggggaggaatccgtggcaatggatcgctttcagcctgaggcatcgcatcaggccccatccatcaacatcaaccaaacctgttcttatttttaaattttatttaaaaacaataatttaaccaatgattgcgcttcgcaatgcttgaaatcagcgctattatttccaggggttttttcatgtatataaacgattgcggagcggaaacaccttgaattctacccgtggggtttgaggttaaccgatccacctatcaccttttgtagtgcgcgttgatcagaacgcggatcattttgtctgcggcgtttggaagcgccgccctcccctcttcccaggcagcaagcgtctgcctcgtcgtgcccagacgagccgcaaactcgggcggcgatagctcgagttcctttctcatgaaacggatttcggcccctgaaagggtggccggtttcagcgccagcgctagggaaaggcttctatgaagacctggtaaattatcaatagcaatgccgtcaccatagggtgtcttgtgcaccgtaaacccgttgcgtaaccacacattacctaggcctgattcggtgtagtggtacatgctcatggattacccatcacgttttgtatgactgaatccagatgctcgccaacacgcgagaaacctgcaccaggggacgatcaaacgaagttgatatcaattattttatttttatttaatcaagattggtagcaaaccctattcgttatttgaattaatctcattagttgtacaaatatataaacacgtgatatatgttcattgtgtttatttagggagatacaaatagtatagaaatgtattttatgagtatagataataaattgccgtggatgctcccggacccaaggccaggggataatttaatcaaaggagtaaagcaatgcgtatattatccgttagtgaggtttcagatatttctggaggtaacgctctgactgattgggcatcaattgggacgggcgcaggtgcttttgcgggagttatgggcggttttacttcaccattgtttcttggtgcatttgccggcgcagggggattgatttgtgctgcgtggggaggaggttggatggtaggaacgtttattcatcataggcttgtatctgattaccctactattttttaaggataaataataatgaatatacgtgagttagcatcttcggaaataatgcaaattgatggagctggttggagaagtaacatggctgaatttgtcgatacaggttctgttattgggacggtcataggttatgctgcgaccggaaccctgattggtgcaggtcgaggcgggcttattggagcggctggtggattttctgcgggattaggttggggaattggaacatacattagtcggagattgatggattctccaaccatccaatagcttatgtttctagattctaagttaattttctctgtgaactcatgatgctttgtgggcaccatgatttttggtgcccacttttaacggtgataaaatgaacaagtttaaagcgataatgattgcacttaatgtttcttttgagtcgtttatttcatcagctcttttagaggaacgggttagcagactacggataaaaattgttttatttattgtttctattcttatttttttatgctttgtatttacggagatggatgtttcttccttcggtgttggagggtgggttatatttgggagcatttatttagcagttttactctccataaattattattttgatagtaatttcaatcccgatgggagtctaaagaaaaagaaggatgcctctgagtaaggtcatcgacttctaatcatacgagcagctgcccatctgaaagtgagcatatgaattataatagaaatagcaatgatagcagggtgattcttttaatagtcgctataataggtgccattatactactgcccataggtttttccgcactccttggattggatacgcaatcagggagaaaggtgttattgtttttctttttagttatcattctttccatcgccttattttttctcgacggctgggaaaccatattttcaacttggccgattctgcttgcgctagcttgggcctgcttttggcccgcactgaattactggtcatctcaaacactctttgggcgctttgatactccttggtgggcaacctggtatacgaagggaggtgtacttttcgccatcatcggcttgggatatttaataaataagatatttgaagacttctaacatcatttaataatttcgttttattcctggcgcttcatcatggcaaggatgggaacatgaagcttgcctaagcgcttctactctaaggtgccggcactgacgctgcccaccagaacgtctacgtgggtaccggcgatctgcacatagaaattcaccacgatagcggcagcgtcggtgttactgatttgcaaggcgcgtaattcttcgtcatcgccgcgttcactgccgacggtaaacagcgtgaccttgcctcctgcgccggtagcgttgctgatctgcgctgcaaagttaccgacgctttgcacgaaggattgtttactggatttagccatgcgttagagtccccctccaaaaaagtagtcatcgttgccacccccaccgcctcggagggcgatcccgtccccctcagcgggccaggcgctgccgtcgtacacgtaaatcagcccgtcctcgctgaccaaataggccgcgcccgcggtgagcgaatgaggcaggcgcgcgtaatcggccaccacaccggcgagcacaatgccagcgcgtgtgttggtaatcaccccgttggtgatatcgatcccggccccaccttcgtacaccaggacactgagcagcggcacgtcggggttgctcacatcaatcgtgacgccgcgaccggcattggccgtccccagcggcgtgcccgccttcatgtaaggcagatcgttccaggcggtgaggccatcaccgatcttcaattgtcccgtgtcggtttctaaaccgaattcgccgccgagcagccgctcattacgcagcctccatgtcgccgcacgcccgcgacgcaccacaaagcgatactgcagcgtgtcagccatccaggttgcctccatccacaatgacgccgtcaaacaccggcatggcctcggcagcggtgatcgtactgtcctgcggcggtggatccggcggcgtgtacgcaaaggcatggcgatgcgtgtgcaggctcgtgccgccgttgtcgatgctccataactccagcgtcacctggccggtggtgttgagtgagacggtggcgctgtcggcgcccatcctggtgttctcgaccagcagcgccccgctgctgtctgtgaagcgcagcccgtagcgttggttgcggggtaaggtgacactgcccatgcggtcgtcaaccaattggtcggcttgggtgaggcgcgcccggtgcgcccacgtcaccacgaactccccagacaccgcctcaggccactgcgcggcggcaatggtcaccttcccagggggataaggccgcacggcgcgtcctacaaatgtcagggggagcgcggcagcatcggctagcgacagctgcgcactgccggtattggtcagtaatgccacgttgaccgtttcgccgttgacatactcggtgagatcggtcgcggcgttgtcttcgtagaaccagatgcgctcaccggctgcatggattgcagcaaccgtgtcaccacagccgcgccccagggtgatgcgcagctcgcgaccgacaggcgtgatgcgatccacgcgcacgatttcgctcccccacagtgcggcgctgccaatggccacctggtcgagccgatacggatcggtgaggctaaattcggtcgcagtgcgggtgacatcaccggcaacgatccgtgcgcaggggcaccactggccatcacccgccacctgatactcaccggtgccagggtcaacgtgcagcgtgtaattgcggctagtggccggatcttgtgcgacagcgagcaaataactggcgtccgccgataaggcgctcagatcgcgactcggcagcgaacgcaccaactcaatgtagggcgcttcaaagacgtgctgtgaggtgatcgacagcggcggttgcgcaggcacggccccacgactggccgccatctccacactggaagacaccggcaagcggtaaatatcctgcgtcaacagcagcgtgatggcaccgcttttcagcgagccgctttgggtgctgccgacaatgcacaccatgtcagcaatgccacgtttgggacactgcaaacgcacatactgattcagccgcagcgcataggcggcacgtgtggttttcagcgcgaaggtacgcagtggggtggtgctggcacgcagttcccgggcggcgatgcgcagcgccagtgatgcggttggaatttccggagagtcaatcgtctggtgaatgacaccataggtctgtaccaacgccagatcctgcaccggcggtgtggtgatgtcggttttctgctcggggtcaaaatacgtgacagacacgctattgaccgcattgtcaaacaccgagggatgttccctccattccaggatcgcatcgtcggtgagaatcggcagcgcctccagcgtatagaggccgttagcaatgtccaggtgcagtttgccgtccgtgcgatcgcgcgacacgctacagccgccgagccgttgaatgcgggtgctaaaggcatcggctgattcggccgctggatcaaagcaggtacagatgccaaatccctcactgtggtaccagtcagccgctgcgcggaagctggccgcgtcgatcccatccaacggctcgcggcccatctcagcgttagtgttggcatagtagagaacgtgcgcgacgttcatcgccaataagcccgtgaagatcgccgcgcggatgaggcctgtcatgatggccgtatcgccgccccgcaccactgccgacgtcgtcccagggacgttgtggaccatgtcggtatacgtggtgtcggccagatcgatagtgatgccgtagcaccgcaggtgtgccacctgatccacatcagcacgcgcggcctgggcgttggtggctgatggcgggtccggcacgccatcggtcacaaaaaatgccacgcggaccgcattgggtggtgccgcggcgtaaaagctgggcatgtccatcgtaccggcggggaaataagtgccatacagcgcctggcgtgcgctcacccatgatttcagttcagcaatgccctgtgcagtgcagttgcgccgtaggagtgtttggcgttgatctggggcgttaccgaacccagccagcatgatgtccaccgcggtgccgctggcgatggattgccccagctgatcaagcaccgcgttgagcgcggttttcatgttgtccagccgcgaccggccattaccgccgacatagtccatggagccggacaagtcgatggcaaaatacaccgccacacagggggccatctgcatcccgatcgcggctttttctggataccagcaggcatcatgatcccagccctcgaggattctgcgaatcttgtaactggccggctgtggatacggattcatcgccccgtacttgccgcccttccacaccaccgtggcaatgccgcgccacgcgggcacctgggggccgagcgtggccagcagataactgtgaggcatctggtcggccttgccgaacagcacgtccatatcacccacaatcccgccttgatctttctcgccaccgaacaggtggggcgcatccacatgaatcgtgccggtgtccgtgagttcccccgaccaggccgtacgctccccgccacgaaattccaggaaggcatccaacgggccaacaccaagcccgtgatggaacatcggcaaataccagtagccgacggtggcctttttcgatttaccgcccatcgccgcgctcctgctcgcactgctgcgcccacgccaccagtgcgttggccagcgcatccttggttgcagacaacgcctcggcagcgatgccgttgcgtacaaagtcactccaatccaagccgtgatccatgaagaactggcgcgccccaccgcggcaaaaaccagcacggcggctgaaatgagggatggtgaacagatgcttggtggtcacggtgagtccggtcatttcttaccgccctttgttttgatgggaatcgtcccctgcatcttccaggccagaatgaattcatcgccgacccagacggtgccaaagtgatgtttcaccgcttggccgtcttgaacgatgggcacctgcgcctgctgtggtttgaccggctccggttttgggcgcaacgccgccgacacgtaagccgccacaaccgcaatcgccagttgccacacccaccaatagaccgcctgtgcgggcgtgtggtgcggtgtgggcagcgccgcggccacgcacacgcgcaccagctgcacaatcagcaccagcacgcccaggcccagcgcccagtgctgggcgcagacgcccgatggcgtgtcgtaccaccagtagcgcaggcgccatctccagaggtgatacccgcggcgcaggcgtgcgatcagccccatgacatggataccccgtcgggcgtgtggagcggacgatagaccgccccgccgaagtgaatggtgttgccccgcgctgcacaggcgtcccaggtgcgcgggcacgttgggagcaccgtgatctctcagtcatggcgcctcctgataggtcgcgtgcacttgggcacggcaggcggcctgggcgttgtatttgttgatttcgttgatgtacaaaccgatcactctgcggaaggtggcgaagatctctggttgttcatttggaatcggcggtactggcaggcgggggagtcggttgcagaccgcttctgagggcgttgttggcagtatcccgagcggcgctacgctcgtgcacgatgcgaggggcaatgacactgcaatcagtaagtacacgaataatgcggatatgtctggtgttttcatcggtggcaatcctgttgtgagtgatcgctgcggcggctgatccacagcagtaatgcaacgatgagcaggaaggggggaaaggtcatcacgaagccctgccttcacacagggcgcgttcatcggcacggcgcaacaccaggccacgcacttcgtcacctacggcgtgtttccagcggtccagttcggcgctggacgctgggccagtcgtgcatccaggtgacttcagggcgcttggaccaggcgtggtagagggggaggatggcatcgaccagtgattcaacgaggttgccgtcgacgtcgcggggggtcgggacgatattgatgccgctggggccgatgatgttctggactaaggtggataggccgccgctgatgatgtcgtggttgcggtccaggtggcgtgcttggttgcgcagggccgttccggtcatggtcacaatggtgttgccgctgccaaagtcgcgggaggcttggcgcaggtgggttttttcggcggcttcataggcctgtcggtaggcaacggctttgacgcggctctgggcacgggaggcggcccaggctggggcaagctggaggaggctgcggtcgaaggcggcaaccaggcgatgtaggcgcggggaggcggtggtcatggggtgtctccgccgctgtctctgcggaagtcggcaatggcaatgcgaacggggccgcttgtggagggggcggcttctgcggcggcgcgacgcagccatttgtccagttcatcgctgatccatttggcatcggcgcgggtcacttggcgctcgccataccggacggattggcccagcaggactttgcggtaggcgtcttttaggagtgcgacttggtcggtagcaaggctcatgtgtgtctctggtgttggtttggaagcccatcggcaagccaggggatgggggctttggtgcgatgcgtcgtgcggttcatagacgcttgctccaacggtcagagccaaagccgctgttgggcagcggtggcatgtcatggggggcgctgggcggggcgggagtggcggtcactgggcgcagggggcggggggcggtgtcagtgggcggggcgacaggtgggtcaaagaggctgccgttggtgggttggtagagggcttcgagggcttgccactgggattcgcgcatgacgtcgactttgagtgcgggggccagggtggcccagagggcgtagacggcggtgtccaggggttcgttgcggacgccgcggggtttaatccagcgtccggcgtctttgtcgaagtattcggcggtgaggccggcgaagtagtgttctggcagtgcgccaagatcagggtgcaaggggtcggggatgtcgtcgccacgtccgcctggaaagcgcagcatgcgggcgctgaggtcttcggcggtgcctgtttgggcggcgttgtctttggcagccagggcggcgcctagccagccgtagatcatgtgtttgaggacgctggtgccaacgccccagacgccaacgtctcgggcgagtgttttgccgcgttcgtccacggtggtttttgaggggcggtagacggcgcggtctgatttgatttcggcgcgaccacgcaccaggtagagggtctgtttcaggaagccttggggggtgtccaggatgcgggattggccggaccagccaacgtgttgtttgacgaattgggcgacggtttcggtccagttgccgccgtcaatggcgacggcgctaatgggcatgtcgatgccagaggcggttttccaggtgccgcggaggtaggcgtccaagtcggcgtagctctccaggacggtggggtccaggtcgatgacggcgtagtcaacgatgtagcggcgttggccgcgcccggtggcgatgaggtggatttcagcgcggtcatgggcaaggtccacgcccgccgcaaggacgaggccgccccggggcactgatggatagacagagggatagatggaatgcgctctgtgacacgtgcgcgagcaaaaaagcttgggacgcttgggacacgcccgtaaatcaaagcccgagcttgggacagaggttgggacagcttgggacagcttgggacaggggtcagaagtcgggcacatcacccctcccgttgtcatgctgtggatggagtgcaggcgcttgctgccctctgtcggcccgtggattgggcgcaggcgctccgtggtcgctatacgtgcattcgcgcacccagcgccactcccgcccgccttccggccacctgcggcgtttgtgcgcccaggtatcttcgacgcaggcctcccccgggagtgggtcacgccctaggcgtttcatgatgttggtaatacgcgactgggcactcttgtcgtgcctggccggatccatgccgatggcaaactccagtagctcatccgctgttgtccacaggacacgccacccggcagtaccctgcaaccgctgtggtgcaatctccctcccatccccagctttgcgaaattgaccggcgaggaatcgctccacgcgggcctcccagctatcgccgatgtagcgtgcggcctgctcggcgggggcgtcatcgggcagtacccagtatgggaagcgatcaaggaacagctgcactgcctcggcccatagctgatcgcgctcggccacaatgcgcgagacatccacgttgccatccgcacgcaccggcagaaagcgccgcccgccggtggcatccttcaggtattcccgatcattggtcgtgccgacaaacacgcactcccgccggtaactactcggcaggcgttcgtaaggcgcgcgaaatttatcggtacgtcgggtgatcgccactttcaccgcggtcacgtctgctttgccgaagctgtccatttcgccgatctccacgccccagcatccctggatgacctgataaaagtccttccccgtgggcgactcagccgtttctacaaaccagtaggtgccgaacaactcgctgagggaggtggacttgtgtttgccttgcgggccttccagcaccagcatgaaatccaccttggccccaatggatggattattgcgatccacccacagcacccgcgccacggcaccgaccatgaaacacaaggaggcttgccgcgcataggtgctgtcactggcaccgaacatgtcgatgagcatcgtctccacgcgcggcgtcccgtcccactgcacccccgtcaggtagtcacggatcgggtgccgccgatgccgccgtgcaaccgcaatcacggccttgagcacgttgtcatcgctgcacttcattccatagcgctctggatgctggagccatgccgcaagctcgctactgtcggcatccacaaactcatcgcgtgtactgccatgccacggtgccggacgggccatcaccacctggttactggaatcgttcaaccagaacaacccttgcaaccgctcatcgttctcaatgatggtgatgaggttatgcatcgtgccctcgacatgaccgtcgcgggtgcgcgttaactgctgcgtccagtcatcggacccgggcacaccgccatgaccaccgccgccgccatgcgtccggcccttgccaccatccaggagcgtgatcaccggcctcgtcattacccccctccccgcacgacattgacgtcaacacgccgcgctgccgcccaggccgccgcctgcgggggtgtccagccatccttctcgaaggcatcggcaagatcccagcccttgctgcacccgtgcgtgtcaatcaggccgatgcggcgcacccccacgcgcgacaggtagtgcgccacacccggcgtgacatcaccggcatccgtgcggttgcccagcatggccttgcggcctacttcatccgcatccggccacaacacgacatcgcgcccggccagcggcgtccagtccacctgacggatcccgttcgtgcccccgggccaagcaactaccgcatactgcggccacgcgcgagcgccggctgcgcaacacttttcaccttccacaatcaacaccggcgcccctggcttgaccgccaacgtatccaaaccaaacaagggccgcggtgctggaaaatgctgcaaacaccactgccgcgcgccggtcggactcacgcaccaggtgagcgtcggcgtccacttttttagcgcccctgtgtcccgatccttgatctgcgcccgcgccacgtagccgagcaaacggccctgcgcatcccggtaggcatccaggcgctgcaccttcagacgagcgggcctgccccgcttgggattccatagcggcaccgtccagtgcgcatcacgcatcacctccggcgcatcctccggtacgggcagcaacggcacccagaccctgtcaggtacatactttggccgctgccgcggcgcctgttgctcggcctgtggcaaggcaccacgatcaagctgacgcaccgcctcacggaaatccacgttgaggtaacgcatcacaaagccaatcgcatcatgatgcgcgccacacccaaagcaatgcacaaaccctttatggggaatcactgtgaacgagggggtgtgctcgtcatggaacggacataagcccgtgtactcagcgcctgtacgccgcagcgtcacagagcggcccaccagctcgaccagatcaatccgcgcgcgtaatgcctgcgtatccaccctagtcatgccgctgcacccgctcacggttgacctgtatcccccattgcacgcgaaagtacgcggcgacgtattccctgcatcctggctcggctgtacaggtggtgcgcgggcacacctgcggcagcgtctggatgtacgccttccactgtgcccgtggctgatcacggagcgcttcgacggcctgacccaaacaccgcgacacactcatgtgcccccccgcaacagcaataccccttgcttgcgctgggatgcttcggcgtctacccacatccgttcacgcgcggccaatgccgccgcaccgctcaaaccaggctcactggaatacaacgccgccagtgccgcacgtaatccggcgcactgccgcggcgtcatcgtgcccctgccttgacggcggtatccactcggtaaacggtgacgggccatcatgcggcctcctcaccagcaacggtgtggcgttcctgaccgtgatgacctgcggcacaacacgccttacgcatccgtgttctcctgctgaaacatcgcctgcacttgaccgcgaatccccaacaccgccgcgatcacatcgtcggattcatccaggatgcgccgcgcaaacggcaggtcatttgtatcaatacggccatcggctaaagccggtgcaatcacttccaacaactgcgcaaattcactcaccaactcagccacacccacgactcgcgccgcagggttagcagtgggcagccgcaccggcaacaccccacgccgccgcgccaagtcgcgctcgcattcgccgcgatacggctcaggcagcgccaacatccaggcatccaccagatccgcaggaagcgtcttaaccgtgccatccatgtaacgccgcagcacctgcgcgttattgcgcatgtcttcggcaacatcatcgccaatacgcaacgcaacgccgcgcacgtcaggggcggtgagtgagagatatttctcggctaacaccatcgcaaacgactgcgcattcattgcggtttggtccaacatgcgccgcgtatatccatagatcacgctttgtagcggcggcagaaaacgaggctcacgcttcatgcgcgcctccaacggcaggtgcaccctgttcgtcatgccgaacatcacgccctgtccccgccatcaagaaaatagcgctgcacgtgctggtagatgcagtactcaacacacttccccccacgcgcggacttcgcggcgtaactccaggcacgtgcacgcgttgccgtcgatcgccccacatgtgcaggtgtatccatatgactcgccaggcacgcagcgacgccgcggcgtgatgccctgcttcttcagagaaacaaagaaggagacacgctctgcgtcgctaagcaggtcactatggaattgagcctgcaatgtagacaggtctttggtgaagccgcgctcttgaagactcggcgcggtcaaccaatcacgcaccgcaagacgggcgcgctcgatcaggaaatgcacggggtgactcttgggagtgaaagcagatggtttaggcggcggcattggatgcctccggcctgtggtctgtgggggcggcaccgaagatgtctgggcgcagatcgtggcgagaaatcgatgttgcagactcaatcgttaagacgtgacgaggagccaccctgcgacgcgatgtaacccattgagacactaaggcgggatgaatcccgagcagatccgctaaggctttctgactacctagcacttcaactgcccttgcaattggctttgactgactcatagcacaaaagatagcagggctatcttttgatgtaagcagctttgctcatcgccacagccacttattactaatagcattgcttttatggcgagaccacctaatccaaaaacaaaagaaggacgtgtgattaccgagggaatcaggaactcagactatacgcaggctaaattagctgaggagctgaacgttaccccgggatttgtttcacagtttgcaactggacaccgccctgttccatggaataaggcggaagagcttgctgcccgaatacgtcgaaaacccgaagaaatcagcgaagaataccgaaagatcaaagcgcactttgaaaaggtgctcaatgaagcacctaatgagaaaaacaaagaagcgaactccacaccagcagagattgaagccggtaagcgcttacatgctcaatgggatgaacgcgccttttcttctggcttaacccagaaggaaatagcagaaatccttgacagcacccaagacttagccacccagtaccttacccgaaaaatccctctggactatgaaacgctctccctcttctccagagcactcaacaccgcgccagaaatcatcagaggcacctcccaaaaacagggggtaatggaaccacagggggtaatggaatcctctacgagtaatgaaaactcatgggctgatgtacgcacttattcgcaacagatgggcctaggcactacgggaccagagattgcggaaaacgtggatattcacacagtgaaattccgcagagactcattaaataaacacaacctaatcccgaacaaccttgtcatcatgcatggcgctggcgactcgatgctcccttacattcaatcaggggactccattatgtttgatgagtcagacacaaccccccatcacaagcacatctacgtgatcatcaccccaggcgcaggcgctgatgagtacaacgttaagcgatgcatcattgatgataagcacagcaagcgagttttttttgctgccgataaccccgagggggatcatgactggcagttaccccgctggaaagacgacccgaattatccaattaagattattggacgggtgaggtgggtttgtaggtgggtagagtaattgcaaccacctctagcgccatagcatagaaggtagttatcaagcattacctagcccacccataatcatcatccagattcccgctgcgtgattcacggccccgtgaactctacaagccaagcccgctaaccggaatagggaacccctacgctcataaaaatatccgtaaattatatagctttataaaaaagcagtcattgacgatgtggaatcaaatggtatcgacgagggcttacaggaaaacctactggctctgtttggaagcagcataaaaaaagtagcaacaactcttatccatagtgctgaattgtatacaacagattttttacatctaaggaacgcgggtgtgatggtttcaagttatccataaagcggatttttaaagactcacgcaacgcatggcacggagtgtttcagaaagacaatattaaactcacagtaataggccacttggaagaatgtaattaattaaccccgccccacctgatagatagcaatcaggtggggacttgacgccgctgcaccactgcggtaccgccgcgggtaaggagcgtaacaactccggacatagcggcccccgcacccgaaaacaaagcggtttttttacgcctgcacgtttttacgtcgggagggcggcagcgatacaagaccctttggggaaagctgcccgccgtctgtttccggttgttaacctcccgacacccacgagtgcggcgcgcaaaaacgtctccccgtggtgatctcacgaaacaggagacatttttatgacgcagttacctgctgccgagtgtttttccggccaatccctttccagaactgaggttgccgagctatgcggtaccccgcaacgcgctcgccaagctgcgtttcttaggaagaacggcattcagcactatctggatgcgcatgattggtcggtcgtgctgcgtgctgcgatgccgccttctccgatggttccgcctgtgtggaagtctaataaggtcgcttgatgggaggtaagccaatcaaaacaggcgcgattccgaggtttcgcgtgcgccctcagaagtccggcgtggtgcattactactacgatcatggcggcaagccgcgcaaagagacgccactaggacgcgactacgggttagccatcaagcggtgggctgagctggagcatgcgcagatcactcctgcgattgcggtgacgttccgccatgtggccgagcgttaccgcgctgaggtgatcccgacaaaggcgtataacacccagcgcgtggagcatcgttgtttggctgcactcctgaagttttttgatgaccccccgcgccgtttgaggccattaaaccgatgaatatccgccagtacctggattggcgcacttctaaggtgatcgccaatcgtgaggtgtccgtgttttcgcatctttggaattgggcgcgaagtaagggaattactgatcttcctaacccttgcgggggtatccgtcgtaacaaggcgacaggccgcgatgtatacgtagacgatacgacgtaccgcgctgtgtaccaggcagcggaccgaacgctcaaagatgcgatggaccttgcctatctgacggggcagcgtgtgagcgatgttgtatctatggatgagcgccagatcattgatggcgctttggagatttgccaagctaaaacaggtgtgaaattagcgattgcgattacgggtgaattggcagttttaataaagcgtatttttgatcgcaagcgggggctgaagctgcgtagcacacgtttaattgtggatgcgaaaggcttggagctaagtcgtacaggattgcgttacaggtttgataaggcacgtgttgccgcagggatcgccaaagaggtatttcaattccgtgatctacgcgccaaagcggcgaccgacaaggcagatttggcgggggacatccgccaagcccaagcgcaattggggcatgcgtcggtgacgatgacggagcactatgtacgcaagcgcaggggcgcgaaggtgacgccgacgcggtgaattgcggagcgcttccaatattgcggagcgggcataatcatgattcatcccccatccatcaacagcaaccaagcctgttctgcttcagctaaccgtctggcagcctgctcgcgctcatcgccaagacgcatcatcacttcgccattggcataattggccggatcggcaagtttgcgatccaattcggctaagagcgtctctaattcgctcacatgcttttccgcagccaatagcttttgttggttgaccggctttttcactgggagttgagaagcaggcgatttggcagtcaccgcagcctgtggctgattggcctcctctgtcttggcacgcacaccacgtgccgcgggacgtgtccgcagccaagcagcgtattggtcaagatcaccagcaaacggctcgaccacaccatcagcaacacgccaaaacgtgtcgcacaccaagccaatcaagtgacggtcgtgcgagaccatcacaatcgctccatcaaaatcactcagcgcctcagccaaggcttcgcgcatctctagatccaggtggttggtgggttcatcaagtaacaagacattcggctgccgccaagcaatcaacgacaatgccaagcgcgcacgctcacctccggaaaaaccatccacaggttcaaaggcacgatctccaggaaaattccatttacccaaaaagtcgcgtatggattggattggtgcttgcggcgcaagggtacggaaatgatcaatcggcgattgtccctcgtgcagtgattcaaccgtgtgctgtgcgaaataaccaatacgcacatccggatgagcgatgcgctcccctgtcaaaggggccaggtcactcaccaatgttttgaccagggttgattttccggcaccattgggaccaagcaacccaatacggtctcccgcctcaagaccaaaatcaacacgatgaagaatcacggcctgctgcgaaggtgctgccgcatgagtatcaacaggtggaggatccgagggtgcagacggggacaataccgaataaccgcaattcacctggcgcagcgtaatcaaggaatgcggtagtttggttggcggtgcaaacgtgatacggaattcacgctccatacggacagcctccgtcccagccaacttttctaagcgtttgatccggctttgtgcctgcttggcttttgatgctttggccttgaaacgatcaatgaagctctgcaagtgaacacgctcggcctgctctttctcaaaagcaatctgttgctgacgtagttgctcggcacgttgacgctcgaagtcggtgtagccgcccacgtatagtttggcgttgccatcatgcaaatgcaggatatgcgtggcaacgttatccaaaaactcacggtcatgactaatcagcagcaacgtaccagggtacttctgcaaccattgttctaaccagaacaccgcatccatatccagatggttggttggttcgtccagtaataacagatcactgggcatcatcagtgcacgtgccaggttcaagcggacgcgccagccaccagagaaggtcgagacggcacgccgctgcgtctgtgtgaggaaacccaggccatgcagcaatttgcctgcacgtgcttcggcgtcgtaaccgccgatctcggctaagcgctgatgcgcagcggctaccgcctcccaatcttcgcgtgcattcgcctctgcctcgacacgcaggacctcggccactacatcatcaccactgagtacaaagtccagggccagatccgacaaggagggtgtttcctgcgcaacactggcaatacgtaattttccaggtaactcaacattgcctttgtccgcttccaattcgccacggatcgctgcaaacagactggactttccaacaccattgcgaccaaccacgccaacacgatcacccgcatgcaaggtgatatcaacattggacagcaacaaccgcccaccgcggcgcattgcgaaatgacgtagagagatcatgcaaccttcctttgatagagaaacagctcagataaacagcgcttgtgagatgccattttatttaacgttatgattgtttgggtttggaaaacagcataagaccctcattacatggttttgccatgtctctcacacagcacaatttcatgttgaaggttgcaatgaacccatttgtatctctcacagtagcaagcgtaaccgcactctttgttgcctcccctgcgttcggtcaggaggccacgcaatctacaacgctggatacgatgatcgttaccggcacgcacgtgaccgagcgtactgtggtggaatcacaatcgccgattgacattatcagcgctgcacacttggccgctacgggtagttcagaactggctacggcgctgtcccgaatgttgccatcattaaactttccgcgtccggcactggcagatggcacctccggtattcgtccggcacagatgcgtggactagccccggatcaaacattggtgctgatcaatggcaagcgccgtcacctctccgcgcaaatcaacgtcaacgccaccattgggcgcggcagttcagccgttgatctgaacacgattcccatcaccgcgattgagcgtatagaagtgctacgtgatggcgcttcggcacaatacggctcagatgcaatcgccggggtcatcaatattgtgctgaaaggtgccactcaggatggcagtttggccgtggagcacggccagtacagcgccggcgatggtgccacatccaagctatccggcgattccggaatctctttcgctaacggacgcggcacgctgcacctggcaatggacatcagccaacaagagcaaaccaatcgtgctggtccctatcaagggagcgcacccaataccggcaactatcccgacattggacgtactgcatttatctacggtgatccacgggtcaatgcggctgcgttctcagccaatggcatgttccatgttggggagcatgtgaagggttacgccactgccatgctcagcaaccgcgacattacgtcgtttgcgttctatcgctcacgcaatcacaacgggcaaagcatgttgctggcgcagcgatatccagagggttacgtgcctgaaatcgaacaaaacagtaaagaccgttcactggttgccggactcaagggcagtaccgagcacggcttgaactgggatgtgagctacaactatggaagcaatcatatcggcttccacaccaacaacagtattaactacagtctgggtgtggagagtccaagagatttctacgatggtgcgttggagtacacgcaacacttgctcaacaccgatttcactcaggtgctggattggggcctgacttatccagtcacactctccttcggcaccgaataccgctatgaacagtggaaccagtcccctggcattccggcttcgtataacggcatgaccggcggcgcgcagggatttgcagggttttcacctctgaataccgtgcatgccaaccgtaataattacgcactgtatgctgggctagatggcgatcttagtgagcatctgtctgcaggagtggccgggcggttcgagcactactctgattttggcaatcaaacatcaggcaagctctcggcacgctatgcattgactgatcaggcggcgctacgcgccaccatcgccaatggctttcgtgcgccgtcactggcacagcaacgctaccaagtggtcaccagtacctacagcaacggtactttctacgagtcagggacgttcccgacaacgagtcccgtcgcgcaagcactgggtgcaacgccgctgcgggctgaatcatcgttgtcctatagcctgggtttggtactgcaaccgttcaagcggctttacttgacgctggatacctaccaaatcgacatcgcgcaccgcatcttgctgtcttccaatcttaacgatgcggcggtacttgctgcactacagcaacaaggcaatagcaacgttaccagtgttcgctatttcgcaaacgcggccaatacccgcacccgtggtgtcgacttggtcggtacgtatacgattccgttcgctgtaggccagcttgatctcaccacaagctacagtggcatccgcaccaggattcgcagtgcagtcacacagccagcagcactctcggccatcggttcaacgcagacgattgtaggacgcgacgaaatcggtcggctggaagagagtttcccaaaagacaagttgatcctcagcggtacgtggaagctgacacagtgggatctgatgctggcagcaacacgctatggcacggtgagggtgcgtaatccaacgtccgtctcacgcgatcagacgtacggcgctcgctgggtggtcgatgcgtcggccagctacaagccagacatgcactggatgctgacgttgggtgcaaacaatctgttgaatgcttatccagataaaacggtcaacgcaatcaactcgatctacggacagatgccttacagcaactatgcgcccttcggctttaacggggcctacgtgtatgcacgtattggttacagctggtaaatggctctgacagactccgcatcacgggaaccaggtgcctcttcaaaacccgtgatgctctgcgtaggtatcggatcgggttgctgtcatcagtgcagggagagtaccggttccgatgcggaatcggcattcaactgagccagtgcatctgagaacgcctctattggctgggcaccattcactgcaatacgcccatccatcaggaagaatgggacaccgtttgcatcgtaacgctgcaagcggcgctgatcatcctctatctcagcgataaaatcttgaccagcaaataatgcggcaaccgctgtgcgctccaatcccacgtcaagcgctaaaggcgccaaaatatcagtatcaaatatgggagttccttcgctgaaataagcactgtaaaagcgctccaaaaggacttcttgcaatccctggcggtgtgccaaatacaacaagcggtgtgcctgcagggtatctccgccctgagtaccaaccaatcgatacattaagccttcttcggcagcaatgttctcaatacgttgctgcattgccacaatctgttcggcggaaccaccataacgctgctggagtacgtcaatcactggaaggggaatcagttccggcattaatcggaatgcgcggtgacgtactctgatatgggcaaacaatgatgaattgcggagggcgcgctccaaacgccgcttgccgatccagcaccaagggcagatcacatccgaccatatctcaatctccacaatagcaggactcgacattgcgacactccttgaaaatatcagtagagtaagtagacacaatccaatcaagggcaggccatctccagagcgcggggatggtctgtaaagaatgtgcacggtgacgtttctttttgaatcttctcatttaaggctacgcggaacgccagccatactagcaagcacgcaatgcattaccacgcctcaggcagtacatgggaactacttcctggcgatgatgcactttaatctgcgccgctcccggaaatcattacagtgtggaaagtgcgttcgctgccatccggaagatgaatcactctcgagaacaggtgcaggcggttctgccgtcagatttagcatggatcagcagcgttaaatcaagcatcgcgcagatctttgctgatgtcttcagtgtccgattgatagtgcctgccctacagatgttctgaaagagattacaaatgctgcgtttaacaatgaagaagcagcgacttctttagaacattcacgattaatttaatgtaaatccaatgaaaaagaaatgaataatttgacattcaataataattcgcgttaatcgttagcagcgcatccacttgctggacttcttagcactgactggagggcgcttttttcccttctcatttatctcaccgccagagtcgccgccacatgaaaaacaggtcccgctcccttgcgcttaccatcacgaccgctctgctttgcaccatctctccactacaggcacagagcacttcaaacaaaacgctggatacgctcatcgtcactggtacacgcatgagtgaccgtaccgccgccgaatcatcttcaccgattgacattatttcccaagaatcactggaagccacggggacaacagaattagccactgcgctgtctcgcatggtgccatcgctcaactttcctcgcccggcagtcagcgacggcagcgatgcagtacgcccagcacaactgcgtggcttgtctccagatcaagttctggtgttggtcaacggcaagcgttatcacaccactgcgctggttaatctcaatgagatccagggtcgcggctcagcacctgctgatctcaacacgattcccattgctgcaatcgaacgtatcgaagtactgcgggatggtgcatcagcacagtacggttcagatgcaattgccggtgtcattaacatcgttctcaagggggctggtaaagggggcagcattacgggtcactatggtgaatacaaagtcaaggacgggaagcaatatgagttatccggggacacgggattgagtttcgcaagcaccggaaaagttcactttgctgctcaaggggggcacgaggaccagaccaatcgcgctgtaccctataacgacggcatcatcaggcaacgctacggtgacccgaagatcaatcaaggggcattttcgtacaacggcagttacagccctgcagagggtgtgaccttctattcactcggtatggtgagccgccgcaaggtgctatccaatggcttctaccgttgggccgacgatgcacgcaaccgaccggaaatctatccagaaggttttttgccgcaaatctacaacgttgccaatgacacctcctgggtgagcggtatgaaagcgtcgactgcatggggactcaacatcgacctaagctacaactatggcaacaatcagctgactttcgatgtcagaaacagtctcaataacagtctggggctgagcagtcccactgcattctacgccggcggtctagaaatcacgcagcatgtactcaacgcagacttcaataagtcgttggattggggacatctggcatatccgctgaacttagcattcggcgtggaatggcgtggtgaaacattcaatgaataccaaggagatgaagcctcctacatgaacggcggagtgcgttccagtgccggtacgctcttaccaggagcacaagtattttctggcttcaagccatccgattccggcggttttgatcgtaacagccattcgatgtacatcgatctggaaggcaatttgacggagaaattctctgctggagtcgccggacgctacgaacactacagtgacttcggcaacaccaggacaggcaaagtgtcactgcgttacgccttcactccccaagtcgcggtacgcgccaccacgtccaacggcttccgtgcaccctctctgcaacagcagtttttccaatcaatcgctaccgactttatcgcaggtatgccttacgaaatcggcactttccgcactgacaacgcggccgcagtcgcgctgggtgcggaaccgttaaaagctgagaagtccaaaaactatagtctgggtttggtcgtgcaaccagtcgatgatctgcatctgacaattgatgcgtaccgtatcaatatcaatgaccgtatcgtcctttctgaaaatctaacttcaaccgcagtacgtcattacctgcaagcaaacggctacgccggtatcggcggcgggcgctatttcaccaacggggttgacacgaagacaactggcctggatgcaatcagtagctaccattgggcgctgagcaacagcagcatggatttcacgctcggttataactacaacaaaacagaggtcaagcgcgtcgccgataaccctgtacggttaacagcgatcgacccaagtgccgtacgcattagccaaactgagctgactcgcatcaccagcggggcgccgcgcgacaaagcgttcctcagtggagtgtggaatatcggccactggtcgtttaccgccacaggcacgcgctggggtgagttcacggtctacaacacaccaacggctgtgcccgtgcaacagacgttcgccccaaaatggacactggatctagcggcatcttacaagttgcagcactggaatttcacgataggtggggacaatgtcaccaacacctatccagaacgcgatctcatcgggcaaggaacacaggcctatttaccgtatagcagatcttcaccttttggcttcaacggagcatttgcctacgccaacatcagctacaactggtgaatccagtccctgggccgatgcctaagaccggcccaggaacattgagtatgagtttggaatgatggaaatggcgttgcaaggattttcctgcagagtacatgtattgagcgcatcaaaatcacagccgctcaatttatatagatcgaacactcttttaggcgctttacctaggcaatacggcaacgtcaatgcgatgactatattaggtaaatatgtggctgaccacggctacacatggcttggcctacccaagcgcttcggccactggtacacgatctacagatgcatcaaggaataagggacaagccaaagccgggaataccggatctgtgtttggagccattccagaaagcgcaagccatgggctggcagataaccaccctgctttgcataacatcagtataaaaatggatccagacaacacagcagcgcaccccaaacaacgctccgtcggtgatcagcaagtcctatgatggatggcacaaaaaaaacaccctttggaacaggcactcatcactttgtctgtaacgcttggagaagcagacgataggctgaaaaatcactcattgtgaagttgttctggcgacagaatggccttttgcagatacgcatagggtaccgcagagaatactgccgaattcttaaaataatgtttgacttagatttcaccctagtcgtgccactactacgcacatgcagcgagtctcaggaatacgagcacacaatgtacatgcactgcgatgagatgaaaccgctattacgcatgcacaatggctatcacaacagtagatagaggaagctctgtgtcatgcgcatgacacagacccactttatatctggatgaaatggcttgcgattataaagaggcgcatcaaaatgtcttatcagaagacatatttaagccaatccgcatcagcagcgtatactatttaaagacattaatagtcccataacggactcagctcagcattccccccatatcagcagcctcttttcatgcctttctccacttctccaggaaagtgcatcagtggatacctactgatatttccaggacgcttcacacacaaggtacagaatgcaccacgacaccagtctcatcgacatcatcgccgtcggcctcagcttggctttcgtactcggcgcactggcacaacgcctgaaactctcgcccctggttggctatcttgttgccggcatctgcgttggtccgtttacacctggctttgttgctgaccagcaaattgctaatcagttgtctgaattgggcgtgatgctgttgatgttcggcgtggggctgcacttctctttggaggacttgctcgaagttaaagcaatcgcaatcccgggcgcactcgtacagatcgcggcggcaaccctacttggttggggcttagcctggaccatgggctggccgatggtgcaaggcgtggtgttcggcttggcattgtcagtcgccagtactgtagtgctgcttcgtgcacttgaagagcggcgcttgatcgacacgcagcgtggacgtatcgcagtgggctggttaatcgttgaagatttagtgatggtactggcgctggtcctactaccagcactggcacaaatgctcaacggcaatgaatctgttgcagcacacacaccgaacggcagcagtgatggtaacgcaatgctgaccgcactgggctggacattactaaagatggctggctttgttgcagtcatgcttgtggtcgggcgtagggtgatcccctggtcgctggaaaaagtagccgctactggctcacgcgaattgtttactctagctgtgcttggtattgcgcttggtgtggcattcggttcggcaaaactgttcggcgtctcatttgcattaggtgcgttcttcgccgggatggtcctcaaaggctcagaaacaagccacgctgcagcgaccgattcactgccattgcgggatgccttcgcagtgctgttctttgtcgcggtcggcatgctgttcaatccagcaatcctgattgagcaccccttgcaggtattggccacttttctaacgattactatcggcaaatcggcggcagctttcctgatcgtacgcgcatttggccatccaaccagcactgcactcaccatttctaccagcttggcgcaaatcggcgagttctcgttcattctcgcaggacttggaatacagttggcaatcttaccggagaccggacgtgatctaattctggccggggcattgttatcgatcatcgccaatccattcttgttcacctggctagaccgttggcaggcacaacaaacagccgaagaaaccactctggttgaacctgagctgccaccaggccccagtcccgacttgtacaaccatgccatcgtcattggctatggccgggttggtagcatgttggcgcaactactgcaaagcagacatgtaccgctactagtgattgatgacaacagcgaacatgttcttaaagcacacgcagcgggaattcctgcgatccgcggcagtgccgccgctgacctggtattggcagaagcacatccagaccgagcgaaaatcgcagtgctggccatcccccaaccactggaggctggcgagatacttgccaagctgcgtgcattgaatccagagctgaccctagtcgcaagagcgcacaacgacggcgaggtcaagcacctgctggaacacggcgccgatgccactgtagtagcagaacgcgaaatggcacactcgttggctgaaatggtactttcatccaccaatcatcccaacagtacacacccacaacctgccatcgcgtgaaccacgctgcccacatcaggctgctgcgccactcaaatagccgaacgactccctcaagataacactcatcaatcatgcgcgtactggcatctgcgatccacagtgttcaacaatggacccaggatgtctgtttacctttggtgtctttggaattgagcctgatacgaacgtttagacgatcaatttcacgcctgtaggtcggtaggttgcctgggaattgttttaagagaagcacgcggtattgcctccattgagatcacgccgcaacggcaacccgcgcaatgtcaccgatttgaaataaaaatatcatttcatgtcgctaccttttggcgctttaactggcaattctcattaaattaggaacgattggagttttcatgaaagtatattttgctggtttcactctcctttgtttatgcactgccgtaacaatcaccggctgtaaaccttccaacgataaccagtcaacaggtgtcagtcaggatgggaacagtacgacgccaccctctgccgagcaaaccaagagtgtgaaaatttcaggcgcaggcgcctcatttatctatccactgatctcgcaatggtcagccgactacaacgccgccactggcaataaaattaactatcagtcaatcggctcaggcggtggtattgcccaaatcaaagccgccacaatcgattttggttcttctgataagccacttgacagcagcgaactgacccaagcgggtctagggcagtttccatcggccataggtggcgtcgtgccggtggtcaatctagacaacatcgaaccaggcaaactacgcctgacaggcccactgcttgcagatattttcctagggaagatcagtaagtggaatgacgcagcaatcatcagcgccaatccggggttacatcttcccgacactaaaatcaacatcgtgcatcgttccgatggctctggcacgacattcaatttcagcaactatctatccaaagtcagcgcggaatggaaacagaaagtgggtgaaggcacttcagtgcagtggcctgggggcgtcggcggtaagggcaacgaaggtgtagcctcatatgttcaacagattaaaggctcaatcggctacgttgaactggcgtatgcgcttcagaacaaaatgtcatatacagcgctccagaacgctgctggtcaatgggtacaaccaagcgcagaaagctttgcagccgccgcatccaacgcagactggagcaatgcaaaggatttcaatttggtcattaccaacgctactggggaagcagcttggccgatcacagcgacaaactttatattgatgcgcaagcaaactaaggatgcagcgcaaagaaaagccactctagacttcttcaagtggtcctttgaaaatgggcagaaacaagccaatgaattgcactatgtgccattgccaccaaatctggtgaagcaaatcgaagcttactgggcaagcgaattcaagtaatgtgttacgcatccacacgtattaagaattctacttggtacgttatccgtacagcgtaacagctatggcgcatctcactcctccaagccacaggtaacacaccgatctgcaatgacttcgactctcattccaaaggagacttctactcctggtggacgtgatctgcgcgatgcaagagccgattatttttttaagctattgctgaccgccgctgtcgccttcgttttaatcgctttagtcagtgcagcgctatctatgctgtggggaggacgccaagcactgcaactgcaaggcgtcagctttttctacagcacggaatggaaccccgtagaaaacaaatacggggcattgacaccgatctacggcaccatcgtcactgcactgattgcgatgctgatcgccgtgcccgtgagctttgggatcgcttttttcctcaccgaagtcgcaccgcgttggcttcgcaggcccgttggcactgcaatcgagttgctggctgggatcccatcaattatctacggcatgtggggactgtttgtgctcgtaccggtgatgaccgactacatcaccccgttccttaatgatcacatcggcactctgccgctgatcggcacgctgtttcaaggaccaccgctcggaatcggcacgctgagcgctggctttgtgttggcaatcatggtgattcccttcatctcctcaataatgcgcgaggtgttcctgactgtaccgacacaactgaaggagtcagcatacgcactgggttcgaccaagtgggaggtgagttggaacattgtgcttccctacactcgatcagcagtcattggtggcatgtttctcggcctgggccgtgcactcggcgaaaccatggcggtcgctttcgtcatcggcaacagcgtacgtttatccccctcgttgctgacaccaggaaccacaattgctgcactgattgctaacgatttcggcgaggccacagaaagttaccgttcggcattgctcttgctcggcttcgtactttttatcgttaccttcgccgtattggtgatcgctcgcctcatgttactgcggctatcacgaaaggagggcaactgatgtccacagcatcgcaacatctatacaagcgccgccgactgatcaacgctaccgccatcacgatctcttgtatcgccgcactgttcggccttttcttccttatttggattttgtggactctcatcagcaaaggactccccgggatcggtctagatctattcaccaaaataacaccgccaccaatgcagaaaggcggcctggctaatgcgttcttcggtagtgcaatcatgtgcctgcttgcaatcgtcatcggtacacctctaggcatcgctgccggcacttggttggccgaatatggcaacacatccaaaacaagcgcagtcgttcgcttcgtaaacgacatcctattgtcagcgccatccatcgtactcggtctgtttgtctacactctctacgtgatgcacaccggtgggcacttctcggcattttctggcgccctggcactagttttcatcgtacttccgatcgtcgtacgcaccaccgatgagatgctgcgtttggtaccaggacaaatgcgtgaagcagcactatcactaggcatcccacaatggaagatgatcatacaagtgttataccgcagcgcatcggccggcattctcactgggattctgctagcactggcacgtatcagtggtgaaaccgcacctctactctttacagcctttggcaatcaatattggagcagcaatatcttccagcccattgcctcgttgcccctggtgatgaatcaattcgccagcagtccatacaagtcctggcaattattggcgtggtcaggtgcattggtactcacagtgttcgttcttctggttagcctgggtgcacgtacactattgctgcgcaacaagatacccaacgaatgaatctttctcgagtacccttcatgaatgacctccacaacgcattgccgatgcaacgcattgccatcccggcctctgcaaatgcgccactgacgacaaccccagtcaaaattgctatacgtaaccttgagttctactacggtacgttccaggcactaaagcaaattaatttagaaatccctgaaaagcgtgtaactgccctgattggcccatcaggctgtgggaagtcgacgctactacgcattttcaaccggatctatgcgctatatccaaaactggaggcacgcggtgaggtactcttagacggcgaaaatatcctatcgccgaaatactcgataaaccgactgcgcagcaaggtaggcatggtgtttcaaaaacctgtgccattccccatgacaatttacgagaatgttgcctacggcatccgtcatcatgaggtgatgtccaaaagtcaaatgaatgaccgcgtcgagcaagcactacaacaaagtgctttgtgggaagaggtcaaagacaagttgaatcaaaatgcactgggcctgtccgggggccaacagcaacgcctatgcatcgcacgcgcaatcgcactaacaccatcggtactactgcttgatgaaccaacttcagcattagacccgatctcaaccagccgcatagaacagctgattgaagaactaaaaactaaatacaccatcgtgatcgtcacccacaacatgcaacaagctgcgcgcgtatcagattacactggcttcatgtatctaggcgacctgattgaacacgaccgcaccgagaccatcttttcacagccatccaaacaacagaccgaagattacatcactggtcgatttggctaacccccacagacgcacacctatgaacacctcgtacaactaccatatcgtgaaaagctacgacgacgaattgaacagattggtcaccgaaattatacgcatgggtgaaatcgcagtcgcacaacttgaggctgcactagacgtggtcgagcgtcgagacgataaggcagcagatcgcatcgtcatgaacgatgaagcaatcgacgcactcgaacaatcgatcagtcacgacgtgatgcgcttagctctacgcggcccgatggcccgcgacctacgagaaatcctcgctggtctacgtatccctgctgatattgaacgtattggtgactacgctgccaacgtcgctaaacgctcaattgcactcaacaccatgcctcctttaccccagactgccagcctacgcgctcttggccagctttctgcgcaagcggtacggaactcattactgtcctacagcaataaagatgagcaaatcgcaacaaaggtacgcgagaatgacgcccgtttggacgctcaatacacggcattgttccgagagctactcacctacatgatggaagatacacgtaacatcactccatgcatccatctactgttcatggccaagaatttggagcgaatcggcgaccacgcgaccaatatcgcggaaaacgtcttgtttcttctcaatggtgaacaaatgctcccaccacgggaaaagtgcgataacaccagcaacgtaaacctagattgaattttagattaaagaatgagctatcaactagagttttaaagcgttatttcgcaaccatcctcgtttcataacctcgaagagcttgtgagaaaagcacgacatgatgattaccttcaatcaacaaggtaaccagctaatctgatcgcaatcctcatttccatcggttatatccctcagcaacctcaggtgctccaacctgatcgaatgctgtcctgctaggctatcgtgatgaaccaatccatcacaccacctacacacccgccaatgtcccaacgcttccgcggctatctgcctgtagtggtcgacgttgaaacgggaggctttaactggaaccaccacgccctgctagagatcgcctgtatcccaattgaaatggacgacactggaaggctctaccccggagaagtcaccagcacccatgtcattccagcacctggtaccgatatcgaccccaaatcactggaagtcactgggatcatactcgaccatccgtttcgcttcgccaaggaagaaaagctagcgttggaacatatattcacaccagtgcgcgccacaatgaagaaatacaaatgccagcgcgcaatcttggtaggacacaatgcgcattttgacctcaatttcctcaacgcagcagtaacgcgaaccgcatacaaacgaaatccatttcatcaattcagcgtatttgacactgtcactctagcaggcatggcttacggtcaaaccgtattagcacgtgcagtacaagccgccggcttggattggaacgcagctgacgcacacagcgcggtctacgatgctgaaaaaaccgctcacctattctgcacaatcaccaacacatggccattggtggttgctggatgatctcttttttctaccttaaacaacaagcctcatactcgctgtatgtcttcagaccaatacaccaggacaagaagacactcacttagacacaccctcattcctgattcctgagactaggatccagctccaccagcaaggcggaagttactctggcatgagtacgtcaatgcgatgtagtaaaaacaaaccacgatagcgcaggaaatatgaaaagcaccctttaaaaaatatttactgttactgctcgttctttatccttagtattccttcataaaaaatagtagtttgattccaacctcaaagtagcaatcaaaaaaaagcattatcaggaagaagataatcaacgctggcaaggtgcatcttgataaccataatgctcacaaatagtgcagcaccaagcaccattattgatggtaataagtcatacacactcaatctgtttctattaactaatgtatataaataagtggtgccatcaatccacatccaaagtcatcaaaagatctcaatctagaacgtgcatacgccacactccagcgcacaactgacactgctgccgcccaaacacctcaatcaattagaatcccatggcatggaatctcaactgttcaatgcaccagcgaaaaaagcgttcggccaacacttccttgttgaccgttactacattgaccgcatcatccatgccatcacccctcaaccaaacgaccatatcgtcgaaatcggccccggtcagggtgcaatcaccctgccactgctgaaatgctgcggctccctgaccgcaattgagttggaccgcgacctgatcgctccgctgaccgctgctgctacacctctaggcaagctggacatcatccaccgcgacgtactcactgtagacctctccatcctagccaaaccaggaaataagaaattacgcctggtcggcaacctcccctacaacatctcctcaccgatccttttccatgtactccagcaagctgcaatcatcgccgacatgcacttcatgttgcagaaagaagtcgtcgaccgcatggcagcccctccaggtagcaaggtctacggtcggctcagtgtcatgctacaagcttggtgtgaggtcacgacaatgttcgtcgtaccgcctgacgccttccaaccaccaccgaaagtaaattctgcgatcaccagactcgtgccacgcgatccaacgacaatccgtattgctgatacaaagcgtttcagcgacatcgtgcgtgccgcatttggtcaacgtcgcaagacactgcgtaattccctagccgacatatgcacaccggctcacttcgaacatgccgggatacgcactaacgcacgtgccgaacaactggaagtcactgaattcatcgcactggccaatgccaaggacacttaaacggcattcatacgctactttgcttacactgcacacatggaaaacaatcccagttcaaagattgaggtcgctatctcgtcccgcttcctcgaccaccaatctaatcgtaatgaaggccgctacgtcttcgcctacaccatccggatctacaatgctggaaatgtccctgcacgactgatcgcgcgccactggcagattaccgatgcaaacggcaaagtcgaatacgtcactggtgaaggagtcattggagaacaaccacggctgcgtcccggcgaagaatttcgctacacatctggggtcgtgttggggaccgaacagggccagatgcaaggacactacgacatgatggccgatgacggcaccgaattcaccgccacaatcgccccattcgtactcagtgtaccgcgaacactacactgacggaggcccaatagatgagcatctgggccatcggcgacctgcaaggctgctacgacgccacccaacgtctgctggaaaatatccgcttcgatccttcacaggatacgttgtggttttgcggcgacttggtcaatcgtggcggtcaatcgttggaaacgctacgcttagtgtattcactccgcagccacagcgtcgtcgtactgggtaaccacgatctttccctattagcgatcgccgtacgcagcgaagaggaacaacgcaaggtcaatcccgatctactacgcatcatcaccgctgaagatcgcgacgaaatactgacctggctacgcatgcagaaactgatccatgttgatcgcaccatcggctggatgatggtgcatgcaggattagcgccgaagtggacaactcagatggcagaaaagctggcacacgaggtggaacagcaactacacggcgccgactaccgtaatctactgcacagtatgtatggcgataagccggaatggtcgccagcgctaagtggctgcaaccgcagccgtgcaatcatcaacgtgctaacacgcatgcgctactgcactccacgcgggcgaatctccaccgaagacaaaggaacaccggggacgcaaactcaaggcatgtatccgtggtttgaagtcccaggcagggttgaacgtgatctgaagatcgtctgcggccattggtcgacgctaggattgaccatcactcaaggtatccacgcaatcgacactggtgcagtctggggcggaaaactcactgcattacagatcgacaccgatgaattacgcctagcacaggtacacggcctgtcaatcgaacatccccgacacacacacacaccacgtcgacaagcaaaaaagcactccaaaaagtagtggccgaacatcacttatttctataacccaaatggatatgttgccaagacaagacaaaacaaaaactcggaaaaatgagcagcttgtcgatggagcatccaccaaataacctctgtccactaatacaacgatggccatttatcactgatcgtttagtggaaacaatcattgcaaaataccaatggtaaatctctccaccgatgacacctttccttgagaatgactcagggcggcagaacataatctttaacgacgtcttagatagatcacaacggacagagattttttcttataagattaatttttacaatcatctccatagcattcttgagtaaaactatatttctggatcaaccaataaatgtgaatcatataacataaattaaaattaaatttggcattaactccagacaaaaataaaaaaattgaaaatctccgcaataacaattcagaccgaattaaaattaaccatacaaattgatcctataaattctttcttctataaaaatatttttttgagacagttgtcttagcgtctatttagagattgcatgaatatttataattcattcaaatgagtctaatcatcatgggttactcaaaaaacaaaccgatacttcctatccttcgcacgcttattttgacaagcgttctttcccctactgtcgtagcagcttggcctcaacgtggtacgttgattgagagcaaagttcttgccacctataaaagggatacgattgctgcctttctacctaatgaccctccatccgaacaacctaaatgcgatgtccaggtcgtcaagctgacttatgcaacagttggtgtacgcagagaaaatgcgacggcgacaggggtcctactcattccagacggcccagactgcccgcgtccttatcctatcctcacctggggaccatccactagcgcgcagcgtcatgttgggcaagataagacaattgttaacgctaacggcaatactccattagtgacgcgtttggcgagccagggctatgtggttgttagcactgattatcttggattaggtgactctgactaccctttccatccttatttacatctgtttacagaagtcagttctaccattgacgcagttcgtgcggcccgtgatgtgctgtggcattcagatacgccgctatcgaataaagtgatgctgtctggcttttcccaaggtgggcaggctgcattagccgtgcagcgtgagattgaagcgcatcaatcgctatctcaggaattttcgcttgttgccagtgcgccgatttctggtccgtatgcgcttagccaaacaatccttgatagttggagtggccggaacaaggttggcgaaaacacgatcatcatcccattcgcaagctatctcatcattggcatgcagcgcacctatcacaatatctacatctccccacagcaagtgttccaagagccttgggcgagcaaagtggaggcattgtttcctggagatacgcaaataagtcttagtgatttccctaaacccgaccaaatcaaaacgtatttccagcctgctttctataacgattttcaaaataatccgctaaatccatttcgccgagatctgatacgtaacgatctactgacttggacaccacgtactccgaccttgctgtgcggttctagcaacgattccgtcgtaccactgaagaatgccacctctgcagttgcatcttttagtcagcgtggtagtacacaggtctctgtgttggacgttgacagtggtaagcctaaaaccaatgatggcctggcagcacattcggccagtttggagagttgtgccattgcggttcgtcaccaattgctcgataagcaacgttagtattctaaatagagatgtaaggggcctctggccccttacgcgaacgcttctataaacgttgcagcagtacctatctcggcgcgatgaccgaattcataccaaagcactacgcttaccaaggcatggcaaccatactgagcctggccacacgcatcaaacacaagttcatccgtacctgcgagtaacccaactccacagtgagaggcagtgcacccagacatcacaaaacatcaacacccccgactccaagccaagtcataagcacgacgcaaacgctcgaagtccctatacactgcatccacactgcgttcaccgcgtattttaagtaatgagcgcagcaagcgagccaaattgcgttctcgccacttggtcgcaggaatacgtagcgcaccgcgatcgaaatcaatcaaccagcactggccagcttggtctaacagaatgttgtgagcattaagatccgcatggtccagcccctcgcgatgaaagcgcgaaatcatccgtccaatctgctcccaatgtgtctctttgctgttcccacgtacgcacatagccagcgaagacactccctccagtcgctccatcaagatcgctgctcgatattgcacaccataccgcacgtaacaagcagccaagggagttggaaccggcaacccacgcgagatcaactcacgcatcaaccggaactcaaggacacttcgagtacggtgaccaccacaccagaagtaacgatcacgattaagcatagcgatcattccgccacgtcggtactgacgcaataccgcattcccaaacgacgcctccacgaaccaagcactaccacgtcctccctcagataccgcatgggctcgccccccccaccaagccggcacaaatagtccatactcaacttgccgcagacgctggcagtcgaacaaaatagctccttccctgtgaccctcgcagaatggcgtcaggatttcattggcgtcaaatgcaaccatgcgttcaagtgtaacaatacgatggagcaaagaccctattctctatgcctgttacgcttatcagcacttggagacatcactcacgtgttaccgctggtccgtaccctgcaacgcgaacgaccccaagcacggctgcactggatcatcgataccatgggcagcaaattgatggatggacttgatgggatacacctccatgtctacgacaagcatacgggcttaagaggcatgcgcgcgttacgtgctgaactcacaccattaggccacttcgatgcacttttgcacatgcaagtgtcattgcgtgccaacctcctgtcagcatttgtgccagcgcgccgtcgcatcggctacgaccacaatcgctccaaagatttgcatggcttattcatcaatgagcgcatcccagacaaccccggcatccatgtgctagatgcgatcggtagcttctgcgaaccactaggcctagtgcagcgtgaagtgcgctgggatctgccagtgtctgaggaagcacgggcctgggcctgggcacagtggaacaatgatggtcgaccagtattgatgatctccccctgctccagccacatccatcgaaattggcaggcaaaacgttacgcagcagtcgcagagcatgccaccgcacaaggctggcggatcgtcctatgtggtggccgcagcaccctagaacgacagacagcagacaccattttggcgcagacccaggtaccactactggatatggttggcaaagatacgctcaaacaactacccgcccttcttgaacgtgccgacctagtcatgaccccagactctgggccgatgcatatcgccaacgcagtaggtaaaaaagtattgggattacatgcagccagtaatccacgccgcagtggcccatattcggacttgcgttactgcgtgaatcgttacgatgcggctgcacgcaaatacctaggcaaaccaagcaacatgctgaaatggggcaccaagatcgagttcaatggagtcatggacttggtaacggttgaagacgccatcgccgcattcgaacgctaccgtgctgactacgcacaccactgaacagcgaagagaaacattcaaagcgtctcggctgatcgataatcctgataagacttttcctcaacatatggggaatccaacgcgagattgatctcctttttaatccgcgcacgctcgtcattctcaaaatacacactgcgcgccagatgaatgaactgcttatcgaaggtctgtgccttctccttgagccgaatttcatcctctattccccacaatcgctcattgaccgctttcaactcagtgcgcaaacgtgggatttcactggaggaagtcggatatgccatccaaatcttttccagagctgaaagctcattacggacgttaaccagtttcactacatccgtgatcctttcggacttgatttgcagaatcgcgatcttatcgagcaactctccgaaagacacgggtacgaagattcctgacataacaagcaccaacaaaactaagagatgggattataatgccagcggattaaaatcgcattaccaataccttgctctttaccttaatatacaagcaaaaaatataaaatacatctcatcaacagagcattaaacgcattatatttccatacctatgttcacctctaaaaacccacctcattaaaactccattcctctttataaaaaaagaaaaggcatcaagcagtttttttcaaatggatatacataatcaaaataaaaaaataacaaggaaactcatttcaaaacaagacaaaccctcaagaagtcttctcatgaaacaataggtagcatgagttatacagtaaccagatattgatcattcatcgataatctcagaaaaaacctattaaaaatacagcttcagcacatcatgaggatgaccaagtaggtccctcgaaatgaatctcagtaaatccaatatgtaaaaaataaagccactgatgactcaatacacatgttttacaaacattaactccagcactgccgtgcacaaactcaaaggcagcaatctaaacactttacagaccaccataaagcccaggaatcacagcatcaaatcgcataacacctaccgtgttaaatgtataagttttacgcaataactggcgggaagagggggattcgaacccccgaggcgctataaacgcctgcctgatttcgagtcaggtacattcaaccactctgccatcttcccggcgatagataggctatcgtacttgggtgctagtgacccatcaagcacataaataagggagcgacatgttgcctgaattacacatgatcggcgatcatgcatggatctgttatccactacattgccatgcttgaatccggccacctttcacaccctggcctaaggcgcgatctaaacgaagacacctactatggtgatggcaagctcaacctatggctggtcgccgacgggattggtggtcatgattgcggcgaaatagcaagcgctctggcacgcgaagtgatcgtacgggaagtacgtgccggtaagacactcaccgaagcaattcacttggcggatgaagaaatcatccatgcctcaaaacatcgcaacgacaccttgccgatgggaaccaccgtcgtcgcagtacgcgtgcatggcacacactttgaagttgcttgggttggcgatagccgcgcttacctttggcacgatggccgcttgatccaactaaaccaagcccacaactccatccctcctccccaaggtagactgagcaatgagcaagtacattcacgtagcaatgtcattactcaagccctgggcattaccgatcctgcccacttgaatgtaggcacgataacaggtgagctgacacccggtatggaattactactgtgcagcgatggattgactgaagaagtcactgagcgagatattgccgccacgctcaaacataacgactgtagcgcccaggaatgcgtggatacgctggttgctgcggcacttgataatggcggctcagacaacatcaccgtggtgctgatccgctatcactgacgtatgaaagtcatccgctagagctagtacccaaacagatacctccaatttcgaccagtaacgacaaaaacccaaacctatatcgcatcccacagcacatgaccagcgatcttacgcaacttggccaaacgcgcctcatgcgcttccagttcggattgcgacaccaccacacatggacgtgttaacaacacatccggcataaatgccacgctagcggcatcgacaccaccacggctgctctcaggcaacgcaaaaccaatctcctcttgtccagaggtcaacgcgatataaacatcggccaatatctgcgcgtcaagtaatgcaccatgtaactgacggtgggcattatccacaccaagacgcttacataatgcatccagtgaattacgctgacccggataacgctcccgagccatcaccaaagtatcaagtacgctggcacgatctgtgattttcccgtactgcgaacccaaccgcgataactcgtaatcaaggaatcccagatcgaacgccgcattgtgaataatcagttcggcaccattgatataagccaaaaactcatcggcaatcatgctgaactctggcttgtccgctagaaactccatcgtcagccccgttacctcctgggcaccggactcaaacgacacatcaggcttgagataacgatgaaatttgtccccactgagccggcgatcaagcagttcgaccgcaccgatctccacaatgcggttccccttgctccattccaggccagtggtctcagtatcaagaacaatctgacgcttcttattcctcatcgacttgctaccgtactacgctgcgccatcgcttggccgcgggccaatacatcaacccgttcattatccgaatcaccattgtgagccttgacccaacaccattcgaccatgtgccgctgcgtagccgcacacaaccgctcccatagatcacgattcttgaccgggtcaccggcggcagttttccaaccacgccgtacccaaccggacatccactcagtgatcccttggcggacatactgcgaatcagtatgaagcttgatctgacaaggctcactcaaccgctccagagccataatcgcagccatcagctccattcgattattggtcgtatcaagctcaccaccaactaactccttctcattgtttttataacgcaacaacacagcccaaccaccaggaccaggattaccaagacaagaaccgtccgtgtacgcgttgatcgatttcatagattccaaaggttcagaaagccaacaacggacgccgcaaacctactcgggctggaatcagaccagtcggtacaaccatgcgcttatcagcttcaagcagacagacagcacgccacggagcacgaataacatcagacggcacaccacttagacgccacgttggcccaaggtagcgaactggccgacggcaatgcaaaccagcatttcgcagtaatgcacaccaacgctccgaacccaccacaaccggccattgccgcaaccagcgcaaacaatacggactcaacggattcagcacaaacagatacaaacatccaccaggtatcaatacacgtgcgcactcctcaaaaaattcgacgacactctcagaaacaacatgctgcaccacaatcacacgcacactttctgtcggcaacggcaatggaagcagacaacgcacatcgcctttaaacccaccatcgcactgtattagatgcaatccgcagccactcaacgcactggttgatggcacctctgtagacacactgaaccataaccaaggctgggacgatcgctcacgcaacacatgaaaaacaaacggatactcaaactgaattaacaaacgccctgcccccgtttcgaaccaggatgagagacccgtttgacatggaggcagagcggcaggcatggtcacattctatgcgactgactccactccccgcattcgacaacaattacatctggacattgattgcccctgacggccgagcaatcatcgtcgatcccggacaagccttaccaatattagaagctcattccaaaggactcatccccactgcaatcctattgacacaccaccacgccgatcacatcggcggagtgccagaactgctagaacgctggccaacacttcccatctatgccccacacgacacacgcatcgcactgaattaccaccgcattggcgagggagattcattgaacatccttggtctgcgattccaagttatccacaccccaggccatactcacagccacttaaccttcataggtaacgatctactgttctgcggtgacacactattcagcctaggttgtgggcagatctttgaaggaacccccacacagatgctcgcatcattgcaacgattggctgcactgcccatacagacccgcgtatgctgcggtcacgaatacacattgtccaacgctgcattcgcactgcacgtcgaccccaccaacaccgccttacaaaaacgtcgacaacaagcaaacgccatgcgtctcgcaaacctccccacattgcctatttcactcgaaagcgaactaaacaccaacccattcctgcgtacggctgcacctaccatccatgcagcaacagctactcacctgcaacgaacaccaatagatgaagtagaagtattcgctacgctacgccactggaaaaacaacttccccataaaaaacatcccctgatgtgctgatgtgctgatgtgctgatgtgctgatgtgctgatgtgctgatgtgctgatgtgctgatgtgctgtacagaattgaaaaacttcaggccatacaccctggcttggacctgcaacaccaactgaatcatcacccaaagacctgcaatcaaacactaagaacacattaagaaacaacaataacgacgatggagatccaccgttgtgaatctctcccatagcattcaggaaaaaccaattatcttcatcaacgacgaatggcacacataacacacccttcgttgttctgcatcccacttctctgatgacaccttattcatatagagagagaatgaatgaaaagaaacgtcatgctactgcttataacaaccgtaacgatgatctcgataggagtattagcaggatgcaaaaaagaaaatcatcgttggcaagatcaacctatcaaaagcgtgaaatggttcaagaaacataacgctgaacgcaaagcccaactcgccgcctgtagatcgaacccaagcaaactggctatcacaccaaactgtgcaaatgccagcgacgcagactaactaataacatgattggaggagattaagacaccatctcatcgacacgctggcaaggatgcattcatcaccccatctattgactgcacagcctaatatcatcatgaatagtgcaattaaatcgcacttttatattattttcttgttaatttgtgatgtaaaaacaataaaaatctttaaatatcatgactgatcgttatatccatcaagtgattgatgcattcaacggttataaaaccgacatggcagacctcatgaattcatcggacaatccataccccaaaaaaacgcttagtctcttattcacaacatataaagaaatgattctatgaaataacaggacgcaattatcaaacagaattcataactacattatgagcttgcgctttagcctatttcagacacagtattaaagaaaagaccttgcaaccaaaacacccataattctaaaataatattaataaaatcaaaaacttatcataaaaaatgaacggcgcagtcaactcaaaggaaacgacctcattgactccgaatatcaaacatttccaaacactcccaatgagaccccagaaaaaatttttaacgataattacatcttcctaaatacaacggcctctccgattcatataaaaagtgcatcccagtgcacccacctgctttatatttcgctcattttccctctgcgaaatttcgttatttattcatgccatatttgaggaatcatgctcatattcatattttccgaatcgactagaatcacctacttgttcagacctgccttaggaaaacgtctgtatggtaactgtctcgaactcaaaatccgcaacgctataaggtgacacatgtcgatagtcctttatgtcggtggaagtaaggatggtgacaaaggtgttgtcccatatggtttcaataaaacccgaacgatgactgaaacaggaccggaaatatacgtacagcgcacattatcgctcgccaaaattggtactgtccgagtcatggcacttgagtctcttcaagaagatacagtgatcgaacgtaccgctgatcactacgcaagacgcgcaagctgaacccacgagagcgtcgtcacctcctcccatcctaaatatagtggcgacgctttccacggttttcacaacctgataaggctgcgacaatgctgaattcctgacaaacggccaccgccggatccatgcaaaacagcctcctcacccagcatattgcgcagatcattgccgctgagatctcctcacagcccacccaagcccgtgcagccatcgccttgcttgatgagggcgcaagcgtccccttcatcgcacgctaccgtaaagaagccaccggcggcctggatgacacccaattacgcatcctcgaaacccgattaacctacctacgcgaactggaagaacgccgctcaaccatcctcaccagcatcaccgagcaaggcaaactaaacgacctcctacacgccgagatcctcgctgccgacaccaaatcgcgtttggaggacctctatctcccatacaaacccaagcgccgcacccgcgcacagatcgcacgcgaagcaggcttagaaccattagccgatagcctactggctgaccccacactgattccagagaccgttgccgccaactttgtcgaccctgagaaagggatcaccgacatcaaaaccgcacttgaaggcgcacgtgcaatcctgatagagcgctggggagaagatgccgctctgatcggtgaactacgtcaatggctcgccaacaatggagtgattcatgcacgcctcatcgacaacaaagaagacactggagccaaatacagagactacttcaaccataccgaactgctctccaaaattccctcacaccgcctgctcgcattgttccgcgcccgctctgaagaaatactgcatttagacctagatcccggtaatgatgctgacgctggccatcaatactgtgaaagcatggtcatgcaggccgcatgtgtcgctgaccaagggcgcccagcggatacatggttaatgaccgcctgccgcctcacctggcgtgccaaactccatatgcatttgatgttggacctcttcaaccaagcacgagaaaaagccgaagcagaagcaatcactgtatttagcaataatctcaaagatctcctgctagccgcaccggctggaccacgcatcgttctggggattgatccaggcatccgcaccggctgcaaaatcgctatcgtcgacaccaccggcaaactgatcgccacagaaacaatctacccacacgagccgcggcgcgagtgggacaaatcactacacaccctaaagacactctgcacccaacatcacatcacactgattgccattggcaatggcaccgcaagccgcgagaccgacaaactagtaagcgacctgatcaaagcgcatcctgcattggaactgcaaaaaatcgttgtcagcgaatcaggagcctccgtctattcggcttccgaatccgccgctaaagaattccccgacctggatgtctccttacgcggcgccgtctcgattgcacgccgcctccaagatccgctagctgaactagttaaaatcgaccccaaagcaatcggagttgggcaataccaacacgacgtcgaccaatttcacctcgccaaagccctggatgcacgtgtagaagactgcgtcaatgccgttggagtctatgtcaacacagcatccgcagcattgctatcgcgcgtatccggcctatctgcgagcgtcgccgaaaacatcactcgctatcgcgacgaacacggatcattcaaacaacgccaagacctgctgaaagtacccagactcggcgcaaaaacctttgaacaatgcgccggatttcttcgtattgctgacggcaaccaacctctggacgcctctgcagtacatccagaagcctacccagtcgtcgaacgcattgtgcaaaccacaggcaaaccaatcaaagcattgattggcgatagccacaccttacgcatgctcaaaccagaacaattcactgacacgaatttcggaataccaaccatccgcgacatcatcaaagaactagaaaaaccaggccgcgacccacgtccagaattcaaagctgtgcgatttacagaaggcgtagaaaacatcaaagacctcaaaccaggcatgatcctcgaaggagtcgttagcaacgtcgccgcatttggtgccttcgtcgatattggagtacaccaagacggattaattcacatatcagccctagcggaccgcttcgtcaaagacccacgtgacattgtcaaagcgggtgacattgtcaaagtcaaagttttggaaattgatgtaccgcgcaaacgtatcgcactgacctgccgcctccatgaagaaacacccccagaaaccccagtagcgaatagaactggcaatgaacgcggcagacccaaccccgttgcaaaaaaagtcaaagccacaccaaccgacaacgcactcgcacaagccttcgcacgtgcacgactcaaatgaacgcgcgcccggggcaacccaccccggacacattctcaatcacatcaatattgcatcctctatacagtaaaaattgcttctaagaaaaactcacacttgcgaataaagcaactggacactggaaatacgcaccttttagtgctgctcatcactcttgcacggatacgccccatctgaggatagcctgaggttttttcaaaggttttttcaaacagcagcaaccttacaccggcaccactcaccaacaacataatgacgatccacacaaattcgcttctagaaagacacacagcatcatgacgtttgtgatgtcatatatcacgctgcacaccccaaataaaaaaaacaacttggatataaatcattaaaaccaaaataaacatctaagaaaacacaacattaataatattttttatagcgatacaacaccaatatattaatcaaaaaataattgcctcaaatgttgattcaacataacgatcatccgaatgtacgcattagcggacaactcacactcaatacatctgaacacatgatcgataatgctaaccgactccctcccgaacgacagcgagtgagcacatccaccctcatcacccgtctcacagcgcaatagcaaaccactcaaaggcgctattggacagcctacgttgtcacagcacatttactgtcatcatcagccaccataattagccaaccatcacattaattaatattcaatcaaggacatctcattacttctactgaagcgttttattagtgtcggataaccaagcaacatcacgcacacgacattgcgacaatttgtcagcagcatagtaccgaactgactccatttatttctctacattgacaacttcccccgagttccccatgcaagaccagatcattgatgcccttcatcgtcaggcacatgccgaagcattgagcctagcccgcgcatggtgcgcctctgcacctggtgaggcacaagctcaacgctggctcgcggctgccctgcaacaatatggcgaacacaaagcagcacttactgccagcgaagccgcactggcgctcgcaccagaacgaccagaactgcatctacaacacggactcctattactggcccaacacgacctatctggcgccgacgcagcactctcccgcagtacccgcttagatccaaaccaattcaatacttatgtcatgcaagcacacttggcaatcgcacgcggcgccctggacgaagcggagcaactcagccgcaccgccacacgcatcatttcggatcatccgcaactgctggccgtgaacgccaccatcgcactgcgtcgcggacaagtggaccaggcactgaccatgctctcacaagccgtcgaactgcttcctgaggaaccagccgtcttattctcccttggcttcgcctatctccagaaaggacatattgcattcgccgagcgcgccttccaacgcgttatcgaactgaaccctcacgtcatcccagtccgcgcactgatcgcccaacttgcacaacgccaaggcagactcgatgacgccctccgcatccttgaagaagccttatctttacctgagggcgacacaccagccctacaccgactcaccggtgaatttgagctactggccggacacccagatcgggcactgacccacctccgtcaagtactggcaacctggccagaagatccacgcaccctggaagcactcctaactgcctggaagcaattagatatggacgatgacgcccgcatcaccctggacgcagccttagacatcaaaccgcgtaaccatgatctatggctggcacgactggccgtggcccccgtcggaagcgacgaggcacgcattgtcatcgaacgttggctatcggccatgccagaacatcttccggcactagaaacactaatgagcctacacgacatacaaaataatcctgaagccgccgaaaccgtggcacggcaaatcgtggcaatcgaaccaggtcggctcagcggtgaacagcgcattgtggaagcactactacaacgcgacccaccaaccgcagtagcctgtttgcaacaactcattgaaagcgtccccgaacatgaacgcaccatactccggccctggctcggcctcgtccaagatcgtgctggccagttcgaagcagctctagcaacctggctgcaattccaagccgagcaagccaaataccggctcccactcccaccacaaacctggactaattccaaacaatggcccgatttagcagcaatccccgccgagatattggcacgcccactgctgatatggggacctccaggcagccacgtcgagcgcgtcaccatgatgatggcctgggccagcagcatgctgtgtgctgaccgctacagcgaaacaccacccgcagatccactacaacgctacgaaacagtctccgaactgacatccggcacattaacgccacaggccttgattgatgcatggcggcaacagctccccgcacgcggcatcgaagacggcaacgtaattgattggttgctctggtgggacaacagcctactcacggcactgcgtccccacttacccgaaggtcggctcatcattgtgctacgcgacccacgcgacatgctgctggattggatcgcctacggctcaccgataccactggcactagactccttacaacaggctgcaaactggctaggagacatcctgaatcaaatcgccgccctgcacgaacttgacctgtatccacaccacctcatccgcctggatggcattgaagacaatccacaggcattggccaccaccctggaagacatcttcggctccccgtttccgatacccccatcattggaagcaccacgcctgcccgctggccgctggcgcgactaccgtgaagtactcagcagcgcattcgatgctgttctcttagccgccatgcgactgggctatcccattgactgaagagcacaccccaagcgttaagatgtccgtctcctcacattccctcccatcggtacctacacggacctgctgagactgaccacggaaacatcacatgcacttaataagtaacgacttcaaaaatggccaacccatcccgcttgaatgcgctgctggccaaactgacggctttgcccccaaccgtaacccgcacctggcctgggacgacgttccagaaaacacccgttccttcgcactgctgtgtatagatccggacgtaccgagcattccagaaactatcggtcgtaccgatatggaaatcccagtgacacaaccacgtattgacttcgtgcattgggtcatggctgacctctctgccgacctgcgtatgattgcccacggcagttgcagcgatggctttgtggtccgcggcaaaaccatgccacctggcccggcaggcacacgccagggcttgaacgactacacgaaattctttgccaacacccctgagatggccggtgattattatggctatgacggcccgtacccaccgttcaacgacctgcgcatacaccgctacctcttccgtctgttcgcacttaacctggaacgcttgccccttccccaacactttgacggtcccgcactcctacgcgcgatccaaggccacgtattgaccgaagccgccctatacggaacctacaccctcaaccccaaggcccaagaataatgcagcgctaccattccagcaggaatggaatccaacccgcctaatgaaaattcacagcgcaaacaccgtgcaaaatgttcacacgctgccgacattcgccgtaaaccccattctgctgcaacaatcgaaggcgtaaaatcgcccctcctacttacctacacactgtctcggagcgaacacgcatgggcctggaactggtcaacgccggcaacaacctaccggaagaaatcaacgtcatcatcgagatccccaaggactccgagccagttaaatacgaagtagacaaagccagcggtgcaattttcgttgaccgcattctctccacccccatgcgctatccctgcaattacggctacgtccccaacaccctatgcggcgacggcgaccccgtcgatgtgatggtcgtactgccactaccgctggtccccgggtctgtcgtccgctgccgtcctgtcggtgtgctgcaaatgaaagacgaagctggaaatgacgaaaaattgctggcagtccccgtaagcaaaatcttctccggctactcacatatcgaagacatcaatcaagtctccgcccactggctggaacgtatcggccacttcttcgaacattacaaagatttagagaaaggaaaatgggtcgagattgatggttggggcaacgcgaccaccgccaaacagatcctgaccaatgccgtacaacgctacaaagacacactgccctgattacgaaataaggatccgtacatacccgccagcctccagcctcgaaggccgcttcaatggatgaatgacgtttcagtcgtgccccatttcagatcaccaagcagcaccgtgataacggtgtatggagccatcccgaacccgccctattggatccgggatgaatccatccgcaccgtatgtttcccttgcgccactgcaaacggcgcaagagaaacagacagcatcagatcatgtccaccacaacctaagcccgctaataagaacatccgtacatctcatacgggttctgcaatgccataaccatcagccaagtaccgcacatctgtgctactggaaacgcatccagcatctgcatcgcctctccacatgcccaaacaagcacatcagtaacgaccctgtattcatctcacttcgtctatccgcccatctagcgcaacagtgactcataacccaatcagtcatacgaacctcaaccacaaaccacttgcattcaagaccacatcgcgttccccaacactggcatataccgcgttcagtcacatcaaagacagcagtgacgccaactttttgccctcaaaaaacgagcaaccgccaacacaaaagcccaacgactcccactctgaaaccgatgcataccaaataatgacaccagattaattttcaccctcacataaaaagcaaaagcaacccgtacagcgtgtacaccaagtaccgcctgccgcactgagagaggcgccatcaataacgatcaaaacaacaatgctgacatcttgcgacgataacgccccaccaactctttgtcttcgatcaaataaaacgcatcaatcaacgctttacgtggcaacccatccttgaaatcgcgattctggcgcagcatctccaagaaatgctccaacgccacctcacactgcccatcaagcaataaatgtaccccaagcaagtgacgttgatcgaaatccgatgcgtccgccgcacacgccgcctggagcacatccagactgggcacaccattcaatacctcaataaaacggagccacgctttagcccgtaacatccgatcatctgtggccagtttcgcaggcaacgcatcaatgagtcccgccgcctcatcagcgacattcgtcttcagcaacgccaacgcaagatcaagcttcagatcattattctctggctcagcagccagtgcctgacgcaaccgtgcaacctcagcctctggatccaatggaatggcgggcgtgtcctctccgaacgcagcggaccgagcgggaagaatcccatgtttcgtcaaaaactcacgcacctgactttcaggcttggcacctggaaaaccatcgaccaattgcccatccttgaccagatacaccattggaaccgagcggacctgcaacgccgcagccacttgctgctcctgatccacattgatcttcgccagctcaaacccaccacgatattcggcgaccaacttctccaaaatcggaatcagcgagcggcacggagcacaccaaggcgcccaaaaatcgaccaatacaggagtctctaaagacttcttcaacactgcggtctcaaaatccgcatcagtcacgtcgaatacatgggatttatcggacatacctaaagactcttctatcaattgatgatgatgaattaatggtgacatatcagaccgatacaaggtcagaggttcacctgatgacggacacacacgacaatccaatttcggcgcgcagctaattacagcgcagacaccagagtaaaaaccatgcatcttgaaacaatctggcggagcacaggcgcgatagcagcagccctcttcaccgcatcggtcaccggcttcgcactcgcactgccagggtaccaacacctgctacatccagtcgccctactcggcgcaccaggcatacccaacgcgaatgcgttcaatctattcggatttctcctccccggtttactcgcagcagtcctggccacctacctgatgacacgccccatgcaacatcccagttggtcgttgcgcatcggcatacaactggtgatgctctcaggactggcttttgctgcgatgggaatcctcccactggacataggcgaactagaggggcgcaccacccaataccacgccactgtgtggctcctgtgggggatcgccttttgtacagccacagcactcctaactttggcactgttatccagaccaggtgtggtcatgctgacatgggccacattcattgctggattgatcgtcgcagcgagttcattcggacctgccgaacgcttgcatcctggcttggtgcaacggatcggttttgccgcttggctcctctggttaatgctagcaggctggcgctggcccacctcatcaccctgaaagaaggcctagctcaacaacacgatcagtatccaaaaacacacacccccacctgagcacgtgtccccacccatcgaatatggagccatccgccaagctgcggtacgctgttatgccttgtgctgttccacgcatcccctctcatgcccaccgaagccaacacctacgatccgcaacggatcgaatccactgcacagcactattgggactccacacacgcctttgaagtcaacgaacactccaacaagcccaaatactactgtctgtcgatgctgccctatccatccggcgcattacacatgggccatgtccgcaactacaccatcggggacgtgatcagccgctacaaacgcatgaccggccacaacgtactacagccgatgggttgggatgcgttcggtctaccagccgaaaacgcggccatcaaaaacaaagtggctccagcgcaatggacctataaaaacattgaacgcatgcgcacccaactcaaatctctgggctatgcgatcgactggtcacgcgaatttgccacctgccaacccgactattacgtacacgaacaacacatgtttacccggctaatgcgtaagggtctggcctaccgccgcaatgcactggtgaactgggaccctgtggatcaaaccgtattagccaatgaacaggtcattgatgggcgtggctggcgttccggagcaccagtggaaaaacgtgaaattccacaatggttcctacgcattaccgactacgctcaagaattactagatggtctaaacacactggatgactggccggagcccgtcaaaaccatgcaacgcaactggatcggacgatccgagggactggagatccaatttgaagtacgcgatgccgataacaatgcattagaagcactccgcgtattcacgacacgtccggacacactgcttggcgtaaccttcgtctcgatcgctgcagaacacccactcgccctacatgcagccaaatccaaccctgcgttagccggactgctgaccgagatgaagcaaggcggtctctccgaagccgaactaaaaacccaagaaaaacgcggtatggacaccggcttgaaagcgatccatccgattaccaacgaacaattacccgtgtgggtcgccaacttcgtactcatggcttacggcaccggcgcagtgatggctgtccctggccacgaccagcgtgatcaagaatttgcgaataaatacggtttacccatccgtcaagtgatcgcactcaaagaacctaaaaaccaagacgaatccacatgggaaccagatgtctggcgtgattggtacgctgataaaacccgcgaatttgaactcatcaactcagccgaatttgacggactagattaccaagacgcatttgaagtgctcgccgagcgcttcgaacgccaaggacgcggccagcgccgcgtgaactaccgcctgcgtgattggggcgtgagccgccaacgctattggggttgcccaatcccagtgatttactgccccacatgcggcgcagtccctgtaccggaagaccaattgcctgtcatcctcccagaaaatgtcgcattcagcgggactggctcaccgatcaaaacagatccggaatggcgcaaaacgacctgcccagaatgcggaggtcctgccgagcgcgagacagacaccttcgacacctttatggaatcgagctggtattacgcacgctatacctcgccaaacgcacacgaaatgctcgacaaacgggccaactactggctgccggtggaccaatacattggcggcatcgaacacgccatcctccacctgatgtatttccgcttctaccacaagctcatgcgtgacgcacggctcgtcgacagcgacgaaccagcaatcaacctactgacacagggcatggtcatcgccgagaccttctaccgaaaaaatccggatggttccaaagattggatcaatccagcagatgtcaatgtggaatgtgacgaacgcggccgcatcaccggcgcaaccctcatcagcgatggccaaccagtactgataggcgccaccgagaaaatgtcgaaatccaaaaacaacggcgtagatccgcaaatcatggtgaccaaatacggcgcagacaccgtgcgcctgttctcaatgttcgctgcaccaccagagcaatcgttggaatggaacgaagccggagtagaaggcatggcacgcttcctgcggcgactgtggacccaggtacaccaccacgccgcccatggtccggccaccgcactagatatcaccgcactggacaccgctcagaaggcaatgcgatgtaagacccataacaccatcgcacgcgttgaagacgactacggacgccgccgcagcttcaatactgccattgctgcggtcatggaactctccaacacattagcccgatttgatgacaccactacgcagagccatgctgtacgtcaagaagcacttgaaacaatggtgctactactcaatccgatcaccccacacaccagccacgcactgtggcaaacactgggccaccccgaaacactgctagaagatcttccattccctaaaattgacaccactgcactggtacgcgaaacaacgaccctagcagtccaagtcaacggcaaactgcgcggcacgattgaagttgccaccgacgcaccgcgcgagcatatcgaaaacaacgcacggaccgaaccgaacaccgccagatttctggaaggactaacagtactcaagatcatcattgtcccaggaaaaatagtgaacatcgttgcccgctgaaccgatcgcatcttaagtagtgttcacgcctactgcatgacactaacgctctgtccccgtatcggcatctcctccaagagagtctctgaaaatgatcaaattacttactcctttcgctgccctcgctctaatcactgggctcactggctgtgacttccatctgcgtaacaaactaaacctgcctggcaaccttccccagccccccaacacgaacctgaaccttccacctaatgtgcccgcgttattgatccagtccagtatcaaatacagcgaactagaaaaattcgtgcgacgtggcctacatgcttcaggcgtcttcgtcattgaagatccaacgaccaccggcgtagcgcaactgaaaatcctgtccgaacgctggggcgatttacccaccgcaatcgacatccagggacgcgcacaagaatacagcctacgctacgcggcaattttcactctgattgatggcaatggagaagtggtcgtgccacaacaagtcatcgaactatcgcgcgactaccgctcccccccagtcgatgcaacaggaaccaccaccgaacgcgagattttggttaacgaactgcgccgcgatatgtccgcctcaatcctgcgtcgtatcgacagcgtcatccgttcacgtcttgaaaagagagaactattagaacaagcaaaaccaccctcaccggcaacctctggcgcctgatcaacgcatcatggaacttcgcccagagcaactcgccaacctgcctgccaatcaacccttagagcctgcctacctcattgccggccccgaaaccctacgcttagtcgaagctgccgatgcgatacgtacccatgctcgtgccgacggcatcaccgaacgcgaaatattcgacgtcgaaagccgtgacttcgactggcaacaacttgcctccagcttcaacgcccccagcctcttcagctcacgtcgcttaatcgaaatacgcctcccaggaggtaaacctggtaaagaaggcagtgaagtcatcacaaggttctgcgccaccccctcatcagatgttatcttgctgatcacctgcaacgaatggagcaaagcacaccatggcaagtggaccgatgccatcgctcgcatcggtaaaatcgcaatcgcctggaccatcaagcctcacgaactacccgactggattacacgccgcctacatagcaaaggcttacgtgccaacacagatgtgatacaccaattaagcacacgcctagaaggcaacctactcgccgccgcccaagaaattgacaaattggcgttattgaaccaaggccctctcctcgacctagagaccatggaatcctttgttgccgacacagcgcgttacgacgtattccgactgaccgaagcgatgctctccggccaacccaccgcaacgatacgcatgctcggcaaactgcgggccgaaggtgaagcagtggcagcactgctgcccattctgaccaaagaactcatccgtaccacgaccctgtcatgggtcaaacatgacaacggcaatctagctgccgaaatgaaagcccagggcatctgggaaacacgtcaagcaccgttcaagcgcgcattacaacgtcatacctcaccgtacaaatgggaacacttcgttgccgaagtcgggcgcatagaccgcatcaccaaaggacgcaacgacggcaatgcatggctatcactcgaacgcctcatggtggcagtggcagaagcagatgcaacacgtctgctagcataacgcccccttcctggagaccgagcgatgctatgcccagcctgcacgtattttatggcggcacctttgatcctgtgcatgtcggccacttagccatcgcacgcgcagcgcatgcagcactgcaagcccctattgccctgatcccctccgccgatcccccacatcgccccacacccggctcctcaagcatggatcgcttacgcatgctgcaactggcagtctccaaggaacctggattgtcagcagacccacgcgaactacaacgcgccgcgcgacaaaaccgatcatcgtacaccgtcgacaccctgaccgaagtgcgcagcgaactcggccccaaaacatcaattatctggttactgggtgctgacgccttcgtcaacctgagcaactggaaagattggcaaatgctaccggcactcacacacctggtcatcgccaaccgcccaggcatcacactgcaaacacaactgccacccaagatggctaccgtcttcaatcatcgctgggtccaagatccagccacactacgcaacacaccacacggccatctctggctattgaaccaacccccaaacccaagctcagcaagcaaagtacgcgctgctatcagcgccgccgcccactgggaagccgacctcacacctgaagtcgcacagtacatacgcacacaccgcctatacggcatccatgacatcaattaaccacaagcttatctataatgcctcccccaacgttcactcgagttaccacgttgaccaatcaagcgcatctcatcaaaaccaccatccccaacccaccaccctcgctaccgatactgctatcaaccgtccacgaagccgttgaaacactcaaagccaaagacatcgtgaagattgatgtacgtgggaaatccagcgtcgcagactacttagtgatcgcctcaggaacttccacacgccacgtaaaatcgatcgccgacgaagtcgtcaaatttgccaagcacctgaacatcataccgttgggcgttgaaggcaagcgcgaagctgagtgggtattgatcgatcttggcaacgtgatcgtacatgtcatgctcccacgcgtgcgtgagttctatgcgctagaacgcctatggagcgtcggcaaccaactgacatcaaccgaaaacgccgactgggaagccccatagaaaaataggcggccaggcagatccttcaatccccccctgcccccacaccaacgatacagcaccgttcgatcacctacccttgttgaataacatgccgatccctatcgctaccaacgccgccggccaccacgtggcaatcaaccgcccaagactaagctgagtccaacccaagttattcgctaaaaacagcaaaccaaccaaaatcagaatcagtccagcaacaacgttagatttagattgcatacacacaacaagacaaaacgggcgcctatcttagcccctacatccatgatgtggcaccctgccccagcacagccaaaccaaaacaaccaagtcactcagcccgctgagggtggggacgacgaaaaaatgcggatttcactccaaatcagccaggcgacgctgcccagccacgtcgcaataccagggcgacaactccatctccatccctttaaagcgaatgccccgcgcgcaatgcccgtcctccaacctcatgaacaacctcaagagcgtttacagcggcttgctccaccaggaaacagcagaccttcaaaaacgttatcggaaaaacgtcaagccgcaccgcaaccagtgccccaaacaggacatcaacgcgcgcgcgttctacatccaccttgccgtcgccaaaactcatcacactgacactgatacctttcaccgttgctgtatagccttttcgtggccaacaccgggcagcggcacgaaagcagtggcgaagacgtcttgatgaaacataagattctgcgtggcggacgctaacaacgtaccaacaatagtgatggcagggagatctttaggaaacaccgttacagtcccgatcaccgtggctgaagtgagcacgagtcaaaacaaaagcctctgggcgagtcgtactgctgattccctacccagcccgactcagcaccgcaaaagaagtgaccgccgacgttgccacatccctaaaagatgtgcggatcgccaagcatctaacagcagaaaaagcgcaaaatctaacgcccacacgcctacaaagacttgatttaaagcacactaaaaaactgcatagccccagagattcaccaaataaaacccacatcaccatcaaacctcttcaatttacccaaccgataaaacacatcccctacaaacacgtaaaccgcgaacactaaaaaatctctctgtgttacacctaaaggcaacatgaaacctttagataaaaatgcgacaaaaaccacgaaatatccgctctcacgccttcgcctccattgacaaaactatcgaaaatccagaataaaactcacctcatttgaccaaaaacgaaaaacacactttattaacttattttttatttatcttcccttattgttaataaatatgattaagcgcatagcaacctcaatactgactctcggcctcgttgcctgtgcatcgcaaccctcatccaagcggctagccagtccaacgacaacagaaccaacgaaaaagacagaaccacccaaagtggcagcacccccactaaatctgtcgcctgtcccgttcgaaatcgcgcgtaacaatttcatacgcgataccgcaaccaagtacgacttggacccgatatggatcgaaaaaaccctagcgcaagctcaatttaaagacgcaatagtagcggccatgtcgcgcccagccgagcaagtcaagccgtggaacgaataccgatcaatgttcatcgctcaagcaagaattgacagtggacgtcaattcttagcctctcacaagatacaactcaaaaaagtcgaagctgctaccggcgtaccagcagaactcatcgtcgcaattattggtgtcgaaagcagctatggcactagccccgggaaataccgcgtactggacgcgctatacacactcgcctttaaatacccacgcagcggcgacccaaacaaactcaaacgcgaagtacaacgcgaattattttttcgcgatgaactcgcccaactattcgcactcagtaaagaagaaaacctggatatcaccacattgactggcagctacgccggagcaatgggcatgggacagttcatgccctccagctatcgtcaatatgcagtagacggcgatggggacggcaaacgcaacctattcaccaacgaggatgacgtattcgcttcgatcgccaactacttcctccgaaaaggaggctgggtacgtggtgctctggtcgcagtaccagccaccctcgcttcgggttaccaagaattcgatccacccgactggatcccgcgttacaccctgaccgaattagccgcacgtggctaccatacctatgtgcccgtcacagccggtatcaccgccaccccgatcagtctggacaacaccaccagtaaagaatactggctgtgcttccagaactactacgcgattacccgctacaacccctccaaaatgtacgccatggccgtgttccaactgtccgaatccattgccggccgcacactccccccaacatgaacacgcgctggtacttcatagcacttgtatttgacctgatggcgtgtagcaccacaccacacaaaagtggcacatacccatccccagccacctccaaaatcacaggcggcaaacccacacagaccaccaacatttgcccaccgacctccccatacgcacccgctcaagagctaccgggtacccgcgacggctacaccaaaaatggcctgtataaacctggcatcaaagatagcatcccagaccaactccccgatgtctcctgtatccctgagccccttgtgaccatcgaaccacgctcggctatcggcaaccaatccccctacgtggtattaggcaaatcctaccgggtccttgacgaagccaaaggctatatcaagcgcggcgttgcctcttattacggaacaaaattccatggccgactgacctccaaccgcgaagtctatgacatgtacgcattcaccgccgcacacaagacactaccactccccagcttcgccctgattaccaatttggacaatggcaaatccgtcgtggtcagagtcaatgatcgcggcccatttcacgacgaccgattgatcgatctcagctacgctgcggcagtgaaattaggctttactgaaaacggactcgccaacgtcgaagtgcgcgtactcagcgaagatgacaacccaatgctcctggcccggcataacaaacgcatcgcaccgacagcagcaaatccgatcgccacgaccatggccccaatggcaacaacacaaccaccaaccaccaacatcgccaccgccgccaaacctgataacccaatcaatcacctgcaaccgctaccaaccaatgcccccctgatcgccgctcttactccgataggatctccaacaaccatcgccacccggcaacctaaatctcctaccattacaagcacaaatgtctccaaagccacaccacctagtgaagcaaccaaagacactcttacagactccgtccatacctcccaagtcacagcaaccaccgccctcgacagcatcctagtgcaagttgccagcttcacaagccacgagaacgccagccgtgcactgacccaactgacctcagccggcattgtcggcgccaacctcagcgcgatcgtcaacagcgggcggactttctggcggctgcgaattaacgcaccaaaccacgacaccgcattggaactgatacgacgcattacccacctcgggttaggccgtccagaaatcgttggcctatgatccatcaatactggattggcatatacatatgccgatccagccatccaaagcacaccgtccttccctgcaaacatgcggctaccccattacgcatccccggatcaaaacacccagcacgtcaactcaaccaaaacgtggcatgcttaattgcatcaaaaatacctgcaacaactgcggctccatacacaacataaacaccacaccaaaagcagcaccggaaagatgtgcactgtgattaatcccatcatcgccgcgacgctccatccaaatgctatacccaacataaaaaacagcataaaaaatcgcaggcgcagggataaacagcacaacaattaacgcccaaggctgcaacaataccgcagcgaacaacacagccgacacagcccctgaagcaccaagactcagatactttggatttttctggttcttaatataactgggcaaaatcgataccaatagcgcccctaaataaaacaaaggataagtcaatagactgccagtaagttcccccatgacggcttcaatcatgctgccaaaaaaatacaacgtcaccatattgaacaataaatgcgaaatattggcatgcacaaaaccatacgtgatcaaccgatcatattggcgatcacgatcaatcgccggtggccaaagaaccaaccgatcaagcaaacgactattattgaaagacaaccaagacaccaccgcattcatagcgatcaaaattaaagtaatcatcaaacagtccaaaaatggtgaaatacccgtacaggcactcgaaacgacacaccatcaatactcaaaaaacaataataatcgacgatgcaacagctgaccgaacaataccaaagcacgaaacaacaccaaccccataaaaaaacgcgaatgctatttcatctcaccaaaaccactcacaccgacacataaaacgaccgcagcatgacacatcaacatcagataaaaacgcatcccacacactcatgcacacatccacactcgcttgaattgactccatacacattccgggaccatagccaaaacaaatatcaccctgcactaagctcaataacgcctaccgcaagattcacgaagcaacaaccaacacatcaccaccactgcatattacctaccacacacagaacacaatcgaaaaaacactacaaacaacattcgccatcatctgacacaacacatcaatcccctgatcctactcatacaacatcagttacactccttacctatgacgttacccagtgattgaaagcctcctataccctccccgagaaaaccagccatttccaaaaaatgtcactccctgcattgatcaccctatattcaaaacacagatttttgaaatttgattctttagaacagcaaaatacacaccgtgacctattgaaagttaacgcctttctcatgggaaacattccaacaaacgtattcagagcagcacccgtgcatcaaaaaaaatcacctaaatagacagtgatctaattccctgtgctgccatcatcggactgcggcacattgattcgggctcacaccgatactagtgagataactcagatcaattttgacactgatagactttccctcctgcaacgctttagcaaactcattttccatttttctccacccgattcggttcaacgctgatgcttgcgatacgagattgatcctatcaccggccctgcccaagctagaggcaatcaaatgccctccttcatcacccacttcgccgcacttccctacacaacgttgttggtaggtattatgatccatttctttcaggaataaattcgcttctatactttttactcgccctgccgcatctgtcacatacgcatggctgttttaggctgaaaaataaccaattgattatttggctgacgctgatcaaacggagtttatttaatgtcattacgtttgaataaaatatgatgatttttggtaatagatttaaatagatttgcagtaataccaacacagataccgccccattacgggcacggcatctgtagatttaaataaatcatcgcaacagggaatgaaatcaatgacgcatcatgtaacgcatcaacacacctcatgtccaatcgtaataatcctcaccattttctccttctccttttaatatccatactgctccagcgggacactcgtcaaagaaaaaccaacatcctaattccatctcttcatctgaagcaggaaatgattttctaaacatctccacctgttcctcggtcgtgcctgtcataaatttgccctttttggcaagcttgagccgttcctcatccaataatttccctattaaaaataagaaatctttctttcttcaaacgagtctggatccacttgcgacgcaataattccatgcgcccgacctacatgactccaaagagaatccaaagccagcccctctaaactttcagcaataacatctatttgatattccctcaacataaagtcacctattacctgaatttaagttcaaccgtttcttttgtaatctcacttaaagcgggattatcctttatatcaatcgtccatcttgctttagttacttgatctgaagaagaaactgacctcaatgtcacaatgctcccatcactcaatttagccgcataaacccccggtttgctcgtttgctttaaaggcacacctccagttaattgctgtgcatagtctttaatctgcgcatcggttaatgcatgtgaatcaaatacctttacatgacctgctttattacttccccctggaacgttgcggtcatagggtacagctttgacctcaatccctcccacgaccaatgtatccttttgactacgcttgccaatcacactttttacatcatccaggcgctttttctgctgcaacgcgatgagttgaccaggtggtttttgggttaaatcagggcctttggggttatttcttatttgcttcagtgcttctttttctgcattggcaatctcttttgcggtgccagcaatccagcggccgccgatcattgccgctttaaggccgtatttagcgaggttgccaatcaatatggaggtgacgtagtcctggcctctttctagggcgacttgttctagggttttttttccggaacgaatcgctttaatgtcttgccaggcttgataggcggtgatgcctttatcggccagccagacggcgccaagaatcactgggataaaggcggcgttgttttcggtttctaggcgggcggcggcgctgctgacagcggcatcgcctccggcggcggtggtgatgccggccacgaggctggtgactaggtcggtacggtattgtttttctgctgggctgaggctggcaccttcggcgccgttggcgcggtccagaaggctgttgatgacaacggcggcggcaccaccggccgcgccggcgcaggccaggaggccttgcagggcgctgcgggcggtgtcgctgcccagggtgtcggcgaggtctttgatttcgcgggcgcccaggctttggatgtagttgactgcggcgttttgcagcatttgggtggccgggccggtcacttgttggccggcggccagggtcagggcggtcacgatggtgtggccggtgccgcccagttcccaagtcatgttgtcttggatgcgttgttgtagggcggccaggcgggccgggtcgcgttggtctgcgggtttggcgtgttcggcctgcagggcctgttgggcttgggtggtttctgcagcgcggttgttgatgaaggtgccggtttcgcgttgtagggcggtgacgatgtcaaagcctgcgttgagcggtaggcaccacttttatttaaatattactgatcaaacggagtttatttaatgtaattacgtttgaataaaatatgatgatttttggtaataaatagatttacagaaataccgatgcagatactgccccatgaggggcacggcatctgtgtatctaaataaatcacatgaacaggaagtgaggtgattaggaatcattaaaaacaccaatcgtactcatcctcaccattttctcctgttcccttatatacccatgcagctacaaatggacaatctgtaaagaaccaaagtcctcccacttcctgatcaatctcttcatccgaagcaggcaaagatttcctgaacatttccactaattccacggcggttccttccataataagctcggtctttctgttaccaagcttgagcaagccatcatcaagtagtttacctactaaaaaaaagaaatcatttttcctttcttcaaatgaatctggatccacttgatcatgagaaagtccatgcgcatcgcctatataactccagagaaaatgtaaaggacaccctaaactctcataaatatcatctagttgctcttgcgttagcatgtcattacctcatctaaatttaagttcaacttttttatttgtaacttctctcaaagaaggattcttgtcgatatcaatcgtccatctggctttagttacttgatctgaagaagaaacagacctcaacgtcactttggttccatcactcagttcagccatataaacccccggtgtcctcgtctcctttaaaggcacatctcccgccaattgctgtgcataattcatgatttgtttatcagttaaagcttctgatttaaataccctcacattgcccgctttattacttcctcctggaacgttagggtcatacggcagaggttccagctgcttccttgaaataataaattgattatttgggtgacgcttatcaaggctggtttatttaataaaactacgcttgaataaaatgctatgtgttagtcacacaaacgcgggtgcagctccattcggaacatggcacccgtgtatctaaataaacaaccgcagcagggagtgaggtcaatgagagatcattaaaaagcccactcgtgataatcttcaccatcttttccttctcctttatgcacccagactgccacgaatggacactcctctatcaccaaccaaattccttctattaactcttcatccgaagcaggaaaacagcttctgaacttatccaccaattccgcagtggtatccgtaaaaaactcgccctttctattaccaagtttgagtagtccctcatccagtaatttccctattataaaaaagaaatcatttttcctttcttcaaatgaattcggatccggtcgctgaggaggaatcctatacgcatcctctatataaccccaaataaaatgtaaaggttcccctgaacgcccacaaaaaaaatctatctgctcttgcgttaacatgtaatcacctgaatttaaattcaaccgtttcttttgtcacttctctcaacttaggattatccctgatatcaagcgtccaccttgctttagttacttgatctgaagacgaaaccgacctcaacgtcaccttagttccatcactcacatcagctacataaacacctggcttcacctccttaaaaggtgccccccttgcccatacctccgcatgttgtctgatttctttatcggttaacatttctgatggaaatactttcacattgcccgctttattacttcctcctggaactttagggtcatacggcaggggttccagctgcttccctgaaataataaattgattatttgggtgacgcttatctattaaactgacggcgttatccacgtacttttcatattgcaccagcagtggcagttttgcggtgtcaactacctcaatgtgaggaagctgattggctttggaagtagccatcccctccaagacatctttactgagattgatgcctgcttcgccgaggatctctgccgctttgaaggtgccggccgcagccaatgcaacgccgacatccgcgatcactgagccaagatcttcaccaaactgctgggcatgttgatcgcctccaacaaggagagcctccgacatgcgagaaaccttgttaagcagttcttgaacggcgctctcacctaattgcagcaggagtgttgggtgggtaagaattttccccaactcatgaacggtatccaccggatgcaggaacaagtgctccagcccgttgatatcgttgatgcctgactcctttaagccttttaagagtccatcaacagtgagtttatcttggcgggcatcaatctcacgccacttcgctcttactttctcctcttccaagcggcctttctctttctccgtagcggcctcaaactcctcgtttagcatttgaacgtattgcttggccgctaaccagttgttatccacggcagcgatggcggcatgggtggcggtggccgcatccgtgttaccggtgctggcgatgccggtgacgatggaggtaatgaggttgcgtttggcttcgcggtcttgggtggtgtcttcggggcgggggtcgctaaataatccggtgaggacgctggaggcggcggcgccttgggcgccactgctgcagtgttgttggctggccgcagcgccggcacaggccagcagggcatggagggcggcgtgtagggggctgccttcggtgagttggccggtggcgacccagtggccaatggcggtggcgccttgttgttggacgtagttgacgatcatgtgtttagcaaggtcgctgctggcagcgctgacgttgctgctggcagcgctgacgttgccgctggcaccggcggctaaggcggtggtgatttggcgataggtgccgccgggtccccaggcgtctttgatggcgtgggcttcgttggtgagggcgatggcctgctcacgtaatgcgtggcgctgttggtcattgaatccgttgctggggtcgtgggcagcgtggtctgcggcggtggcttggcgggttttgagatcggcttctgcagcgcggttgttgatgaaggtgccggtttcgcgttgtaggccgctgacgatgtcaaagccggcgttgatgcgttgttcgtcaaagatgggtgtgagggcgttgctggtggcggtgtcggtgaggaggtcgcggttgagggtggcgatagtctcggcggcggtgtggccggtgagggcgtgttgggcggtgtcgtcacggatggtgagggcgccttggctgatgccgctgtaggtggtgctgtggctgctgtcacgggcggtcatggcgctcgggggggaggcgctgaggccgttgtggctgggtaaggtggtgccggggacctgggtggcggtggcggcgtggccttgttggtcggtgccgacggtgccgccgttgcggctatagccgccgcccaggttgacttgggtggcggtgtagttggcgtggttttcaatgttctgcaggatcagggtgccggtgtccagggagttcaggccgttgtggatggcggtgctgttggaggtgatggcgccgccaatgaggtgggtctggccgccgacggtgagttggtagccgccatcgccagtaaagaggccgctttgttcggtgacgctggcgtagtcgctgcggatggtttggtggttgaggttggcgctgccgctgaagcctgcgccagcggtgaggctgccgccgaggctgcggtctgtgctgcggtactggtgggtgtcttggaggctttcgatgcggaggttgccggcaatgtcggcaatgacgtgtttggcggtgccaatggcgcctttcatgaggaggtcgccgcccgcgtcaatggccagtaggttgccgcctccgacgtggctgttgctccaggtgaggtcggtagagtggccgctgcctgtggaggtgctggcgtgggcggtgaggccggcgctggtgccgccgctgcccaggttcacggccacgccgacacctgcgctgcggcctcggttgtcgcgttggttggtgacggtgttttgggcagccagcagggcgatgtcgccatcggctttgaggtaagtcatggtgtcgccgcggacgtcgctgccttggatggtgagggtggaggcggtgccgtcgccggtggcgctgatgtggacgttaccgccggcggtgacgttggaaccggcagcggtgctggtggtggtggtggtggtgctgtcgtgtgtgctacggccgacggtgagggaggcgttgaggccgcccagggcgcgggggtcttggcggacggcgtcaatggtgtttttggcgcctagggcggtggtgaggccggcgagtgcctggaggcgagggtcgccgctgcgagcggcggcgtgttgcatttgctgggcggtctgggcaccggcaatcaggggggtgctgagagccacggtgaggccgctttggcgggtggcggtgtgttgggtggtctggctggtgtggtgcgcttggatgatgtcgacttttttggcgtggatgtcgatgtcgccgtgaggggacaggacgtcgctgccgatctgttggtagtggccgcccgccaggagggtgacgttgccgttggtggcgccaatcagggagccggtggtggtggtggctgtggtggtgctgtcggtgcgttggctttggttgcccagggtgagggaggcgccgccgttgcggatgaggccgcgttgtttggtgtggtgtgagtaggtggattgggtggtgtgggtggcggcttggagggtgaggtcgtgttcggcctgcatgtaggtgccggcatcggagacgacgtggctgccggtgacggtgatgttgttgcctttgacgaagactttatcggcgctgagggtgctgccaatggcctgggtctgttgttggtcggcgtgggtggtggtggtgcggctgttgaggaggccgctgcgtttggtgtggctgtcttggctggtgtattggatggtgtcgccgtgcgtaatggtgacgttgccggtggccagggcggtgatggtgccttgggtgctgtggagggtggcggcacgcaggttgatgtcttggccgctgttgagttggatgtcgccgttgccggtgatgctggtgccgtattcggtgtcgatgcggctgtggcggctgttgcgggggtcccactgggtggtgtcgctgcggtgggtggtgagggtgcccaggtgtagggggccggtggcgttgagggaggtgtagccgtccgtgccggtgttgttgatggcaacgccgttgtgggtcatggcttggtcggtgcttaagcccaggtaagcgccggggccggtgacggtgaagccggcctgttggtccagttccgtcacgctgtggtggcgggtgccttgggtggtggcgtcgcgcagggtgctgctagcaaggaagttgccttgggcatggactttgaggtagccgcgggctttgaattgtccgccgagggtggtgaagtcgccggtggtgtggatgtggatggcgtcggcggtgaggcggccgccttgttggtccatggtgtgggcgttgatgtcgatgaggtggcgggcgtcaatggtgccggtgttggtgaaggtgtgggcgttgatggtggtgctggcggccgccaggagggcgccgtctggggtgaggtcgccggtgcgggggcgcaggtagaggcgggggacgagggcgcgggtggtggtgccgtcgggcagttggacgtcttgttggacgagccagacgatatcgctggtgagttgggcgagttggtcggcactgagggcaatgccggggcgcagttggtgctgtttggcgacggtgacgccggcgtccaggagggcgcggtattgctggtcgtcgtcggtgtagccgtccaggcggcggcggccggtgagttgggcaagttgttcgcggatgaggcgttgttcgtagtagccgtcgccgaggcgtttgtggagggtgtcgtggtcgccgagggcgtggagttgggtgtcggcgctggtgtaggggcggccgagggtaaagcgggggtcggtggtgatgagggtggcggcgtcggggtgaagggtgaagaggctgttgttgggcagggtgagggggccggtgggggtgacggtgacggcggggggggcggcggggtcgcggatgggggcgttgggggtggtgatgctctggtcagggatgtaggtgagttcttggccggcgctggggccgttgtcggcaagggagacggtgtggaggctgggggaggtgtcggtgacggtgatgacgccgttgacgacactcaaggtttgggtgctggggttgtaggtgagatgttggatcggctcgggggcgtgggtggagtcggtgacgttgttgagtgtttgggcggcaatgtgttggtggccgccgctggtgatgcggccgccaatctgtgtggtgggggtggtgcgggattcattgctccatggttcggagactttgccacggtaggtggtgctgatgttgtggaaggtgtcggtgcgggagagttggagggcgcggttgtcgatcagcaggactcttttgtacttgtgttcgtcatctgatttttctttcgtcggatgggggggcaggccaacgatggtttggtcgccgccggcgaggaggtcggcgtagtggttacgcagggtgtcggtctgaatcatcatggcgccgccggtctggatgagggcgggggcgccggcatcggggttgagaatgtcttgttgggtggttctggtggcatcgcggtatttctcgttgtcgcggacatcgttggggccgcggtgcatgtcaatgagggtgtggtctgggtcggtgtagtcgtgccaggtgacgaggcggacgcagtcgtcggtgcaggtgccgtagttggagtcgtaggtgaggcggtcatcgccaggggcgtaggtgatggggacggtttggaagcgttcgttttgctggggggtgtccaggccgatgaaggcgctgtggttggtcgcggcggcggcaacgtggtcggggttgggttgtttgtcctgacggtcggtgtagtagaggacgacgctgtcgccggtgcgggcggtgaggtccatgcggcggcgttcggcttggctggcatagaggccgccacgggcatagaagtaggcgctggtctggggggtgaggcggacgatggcgcggtggatctgttggccatcgggggtgatgtaggggtcgtctttgatgatgtcggcggggttgaggtaatagatgtcgtgggcgtcgtagttgctggtgaatcggaagttgcctgagccgccgttgggttggtttttgcgccagtggggttgttccatgcgggcttcggtcacgacgtcgggggcgtgggcgatgtggacgttgtcgcggatgttgttgagggtggtggtggtgatgttcagggtgccggtgatgtcgatggtggcgctgcggttgtccaggagggtggcggtgccggtggcgtggagggcgttgtccagggtggcgccgatggcggcatctccatcactgagaatcatggcgttggcggtgttacgcagggtgtcagcaccaatgtctaggcgttggcgggcggcgatggtggcggcgtgggtgtggccgtcgctggtttcatcgcggttggtaagggtctgggcgtggagggcaatgtggtcgccgtagaggcggccggtgccaaggttgtcaatggtgggggcgctgaggtgggtggtgaaggcgtcgatgaggccgcggttggtgagggtggcggtggcggtgagttgggcgagggtgttggcgatgagttggccggtggcggtgttggtgatgtcacgggcgtggacggtgaggtcaccggcgtgcacgaggccgctgttggtgagggtgtcggtagcggtgagctgggcgtggccggtggtgaggagttggccggtggcggtgttggtaatggtgttggcttgggcggtcaggtcaggggcttggagcaagccgctgttggtcagggtgtcggcggcggtgagggtggcgtggctggtagccaggaaggtgccggtggtggtgatggtgttggcctgggcggtgaggtcggcggcttggaggtggccgcggttggtcagggtgccggtggcggtgaggtgggtgtggccggtggccaggagttggccggtggcggtggtggtgatgtcacgggcctgggcggtgaggtcggcagcttggagcaggccgctgttggtcaaggtgccggtggcggtgaggtgggtgtggccggtggccaggagttggccggtggcggtggtggtgatgtcacgggcttgggcggtgaggtcggcggcgtggaggaggccgcggttggtgatgtcgccggcggtggtgagggtgagtaggccggtggcgctgaggatgccggcggtgtcgaggctgtcttggagggtcagggtgagggcgttgccggcatggaggcggccgtcgccggtgaggcggtggagggtcagtgtttgggtggcgccgctgaggagggtgccggtgtggttgctgaggtaggcggcagtgaggtcgagggtgccgccggcgctgagggtgccggcggtgttggtgagggtgtcgctcagggtgagggtgaggttttgagcggcgctgaggtgggcggcggtgttgtccagggtggtgctggcgatctggatgtgggtggcgtagaggccgttgtctgtgggggcggtggtgtcgctgggggtgtcacgggtcgccgcaacggggggtgcggtcatgggggtgctgtggttgtccagggtggtggtggcgatgtcgagggtgccggcggcggtgatgcggccgtcgtggttgttcagggtgtcttggaggtggaggcgggtgtcgccgccgctgtagaggcggccgccggtgttggtgagggtggtgccgtcaatctggagggtgccgctgctgctgatgtgtccggcggtggtgttgtcgagggtggtggtgtggaggtgggtggcggtctgggagtcgatggtgccgccgcggttgtcgagggtggcggtggtgaggtcgagggcggtggcagccaggagggcgccgccgtcgcggttggtgagggtggcggcgccggtgtcgatggtgagggcggcggcggtttggaggaggccggcggtgttgtcgagggggccgctgtggagggtgaggttgccggtggtggtgccgaggcggccgcgggtgttgtccagggtgtgaccttgggtgtccagggtgagctgagaagccgtcaaggtgccgctgcggttggtgaggccggcgctggtgagccagagggtgtgggcggtttggaggaggccggcggtgttgtccagcaggccggtgagggtgaggtgggccggtccggcggcatccagggtgccgtgttggttcaggaggctggcggcggtcagggtgagggcgtcggtggtggtgagcaggccgttgtcttggttgttgagggtgccggtgatgcgcaggtccagggggccggtggcggtgtggaggatgccgccgcggttgtccagggtggtggcgtggagggtggcggggccggtgatctggaggtggccgcccgtgttggtccaggtgccggtggtgagggtggtggggccgttgagcaggaggtggccggcggtgttggtgagggtgtcggtgatgtccaggcggttggggccggtggcggtgctgtggagggtgccgccggtgttatccagggcggcggtgtgcaggtccagggtgccgttggtggcaatggtgccgccggtgttgtcgaggcgggtacgggcctccagttggagggtgtgtgttccgtaggcggtgaggtggccgccggcggtggtgaggtcccctgtgtggagggtgatctgttgggcggtggtggtggcgtggctgaggtcggtgtgggtgccagtgagggtgagggtgtcttggctggtcagggtgccgcggtgggcggtgagggtggcggcatccatgtgcaggggcccctgcccgctttggacggtgccgtcggtggtgtcgagggtggcggcggtgagggtcagggaaccggcgctggcgagggtgccgctggtgttgtcgaggaggtcggcaatggtgagggtggcgctctgggggccggtggtgaggaggtggccgctggcgttgttgaggtgttgggcggtgaggtccagggtgccgttgacgtggagttggccggcggcgttgttgagggtgtgggtgtgaatggtggcctcggtggcgagggtgaggatgccgtgttggttatccaggcgttggccttggagggtgaggcggttgagggcggcggtgccgtcgcggttgtctagggtggtgaggatggcgtcgatggcaccgccggcggtgatgtggccgccgcggttgtcaatgtcgttttctagggtgaggcgaccggcagccagcacaggcgctgtctggggatgggaggggatgggcatcgtgccggtgctgggaggtgtgtcggtagcgggagggacgctggcaacgggggtcgggtccgctggggaggcttggccggatgccggggtctccaaagcgccgaggcggccttgggcctggttgtccaggtgttgggtctggagggtcaggggttggaggccggtttgttggatgtggccgccccggttatccaggcgggcgccggtgatgtccaggcgggcggcggtgagggtgccgctgcggttgtcaatggtggtgggggtgtgcaggctcagggtctgggcggcgctgataaggccgctgttgttcactgctgcggtggcggtgagttgagtgtcggtggcggattggaggcggccggtgttctctagaagaccatccacggtgacggtgaggggggcgctggtggcgctaagttggccggcgttgcggacgcccaggccgtgttcggtgccaatcagggtgattttgccggcatacatgccgcccagggcggagacgtccagggccacggtggggcggtcgcctggggctgtaggcagggaggcggtggggtgtccgtccagggtgacggtggcagggccggtggtggcctgaagtttttgggcccagaggccggcgttgagttggacggtgcgggcaatcagggcggtgtagtcggcgctgcggctgtccaggcccaggccgtcgagttgaatggcgccgccgtggacgcggtagtggtctagggcaccgcgggcgttaaagacgggggtgcccgtggtgagggtgaactggctggcattgatgacgccgcagccgttgcaggtgatgccggaggggttggcaatgatgagttgggcgcggtcgccagccacttccagatagccatgcagttggctgggtgtccggctgttgacttcgttgaggatgattttggcggtgccggtggccagccaggggttgccttggacggtgcccgccaggtgggtctgggccggggtgcgggcgttgttgaggatggcgccttgtggggtgatgtcaaattgttggtaggtgttgcgggagacgcccgcctggctgggggtctggatgtggatgaggggggtgccgttgggggtggcaaggacggtcgggcgttgttggcctggggcgtgggggtcggcgatgacttgggcggtggcaatgcccgcaatgctcacccagccgaggctgagccacagggcaaaggggatgggatggaggcaggcacgcgctggccgttgtgctgcaagggaaggacctggggtaccgccgggggcggtggctcgttctgaggccacttgccacaaacgcagggcacggttgtagatgaggcggtacaggtccttgttcatgaggtttcctttaggtgaggggcatcccgaatcgcttggtgtggggggatgctgtgttaatgggtgatttttttcacattttatcaggggcggtaggggaagaaggtgaagacggaagggaggaatgtgccggatgtggatgtcagaaaaatctgaaagacggacagaatcgggggaatggggttaggcagggcaagcaatctgtggcagacataggaatgcgttgccctgcccccctgccctgtcaaagggcagctggcatggttgtaaggctgtcatcagaggaaggcgctgggtgcgggtgtgaggtgtgttctgcggccaaggtctgtagtgcctgggtggtgtctgtggcacgggtgtggatggggttattgataaagctctttggccaatatcaaagccagggttgatgttttgtgggttgcagatgggctttgtatgtaaataaatgacctgaacaaggtatgaggttaataacgcatcatgtcaggcatcaaaacacgtcacgtccataggtagcaatcttcattcttttccccctgctcattttccccctcctctttaaagacccacaccgctccagcggggcattcgtctgtaaagaaccaaattcctgctcctcccaggtcaactgcttcatccgaatcagggaatgattttctaaacatttccactaattcggtggtggtgccgctgagaaatttgccctttttagcaagtttgagtttgccttcatccagtaatttacctagtagaaaaaggaaatcattttttctttctgcaaatgaatctttatctgtttgggcagcatacattccatacgcatgtcctatattaaaccaaaggaaatcgaaggcatgaattaaatcttcataaataaaatctatttgttcttgcgtcaacatatcatcacctaaatattagttcgatcgcttttctattggaaactttagtcatcaaatccgggaaatttaggaaggtaatcacccatctccattcactcaactcttgtgaagaaaacactgacctcaattgcaggatggctttaccttcctgtttagacacataaatacctggtctaatttcttttaaagggatatttcctgctaattcccgtgcatagtctttgatttgctgatcacttaattcttgtgattcaaaagctttggcagtatcactcatcactttctcctaaaaattcacatactgtgtcacttttatctttaaacataaaataatctatttttcatccttaaaaagccaccacttgtaaacatcttgacctttttcgccttgtccttttaacacccatactattccaccaggacactctgtaataaaccaaatcgcttgcgctttttcatctgaatcaggaaaagaatttctgaacatctccaccagtgccgcggtaggcccagagataaagttgcctttatggttaccaattttgatctgtccttcatcaagtaattttccaagtaaaaagaataaatcatttttcctttcttcaaatgaatcatgatctatttgcccaggagaaagcccatacagctgtcctatacgaaaccaaatactttccaagaaatagtctgggccctcacaaataatatctatttgttcttgcgttaacataaaatccccttttaaaatttaaaaaaattaaaatagtttgaataaaatatgatgattttctgtcattaatattgccataggtatcgctctttggggacgcgagatgggtgtatctaaataaatcaccgtgatagggtgtgaggtgagttattcatcaaggcatctcatgtgcactcctcatcatcttcgtatgggggatttgagtgatgctgttgtcagagaagaaatgtgtgaggtgtccgggatcagcagggggaaggggcaggaatgagggggctgcggtatcacgttggaggcggctgtggtcgtggttgagatggtgcgggggaatgggggtgttcgggggcagtcttacatggggaggtgggctgatgggaggttgaggggagttttggctgtggtggggtgttgggggtgggtggtgacaggtggaacaatggacggtttaaaggggatgtggtgatggcgtttttagaggtcagtgtgcagtgtcaggggaggagtcaggcgcgctatgaggaggtattggagagtttcggtgcgttggcagtgacgttgttggatgccgatgcggatacggttcgggagcggggggtgtttgagccgggggtgggggaaacggtgttgtgggatgttgtggtgttgagtgcgttgtttccggtggaaacggatgcgttggggttgttggctgggctggagggtgcggagccggggttggattgggggggggtccgtttccgtgtggtggtggatgaggattgggagcgggtgtggatggatcagtttcaaccgatgcgttttggggagcgtacgttcattgtgccgtggaatcaggcggtgcctgtggaggcgtcggggatggatgcggcggtggtgcggttggatccggggttggcgtttggttcggggacgcatccaacaacggggttgtgtctgcgttggctggatcggctgggaggggatggggtgttaggggggggtgaggtgctcgattttgggtgtggttcgggcattttggcgctggccgctctgaagttgggggcggtttatgcggtgggtgtggacaatgatccgcaggcgttgttggcaagtcgggagaatgcgctgcgtaatggggtggcggagcggttggaggtgtatctgcctgcggaggcgccggtacgcaggtatccggtggtggtggccaatattttggcgtcaacgttggtggcgttggcggagcggttggcggggtgtgttgcgccggggggacggttggcgctgtcagggattttgcggggggaggagaaggaggtgttgcgctgttatgcggtgtggttggatgtgttgggttgtgaggaggaggatggctggatacggattgatggggtacgccgttgttgagaggggatgggtgttgctggcggtgatgtggaaggcggtagccttccctgccccgtcaagcagacaatagattggtcatcgactgagtaaaggggcattgatgagtgcaatcgttttagccgttgcgttggccgctgggcaagtgaaggagccgcctgcggctgtaggtatgagtgaaagtcaggcggagcagtctgcgatgttgcttgcgcactgtgctggtgtgtgggactggatgggcaatatagaaaaggtcgctgggaagccttcccgtgtggagcagttccataggaaggcagatgaggcggaaacggcggcgatgtgggtgttggcttcacagcactatgtggctacagggaatacggccagtggtgcgcattggaaatcgcttacgcgcccgaaacgggaagccgggttggcgcatatgaatgcattggcagagccgggacaggagaaggcatcggtggctgccatcaagggatgtcaggggatgttgcaggagcaggaaaagattctgcacatgatgcaaaagactaaggtgaagcaatgaggggggtgtgggtgatgttgtcaggggattgtagggggctatctatgggtatgcgaggcatccacgacaaggatttgatgtgatgaaagccagtgagatgaaaaaggggagcattgttgagtacaacaatgggacgtatcaaatcagggatattcagcgtagttctccgcagggacggggcggcaatgtgcggttccgctttgtgatgtatagcgtgccgggcggtagtaagttggaggcgagttttgatgccgatgagatgttgactgcggtggagttgctgcgtcgtgaggccagtttttcgtacaaggacggtgaggcgtttgtctttctggatgaggaggattacacgttatatacgttggaggcggaggccatcggggataacgccgggtatatcagtgaggggctatctgggtgttatgtgcagctgattgatgcgtcgccggtggcgttgcagttgccgcaacatgtggttttggaggtggtcgatacgcctccggagttgaagggggggacggcgacgaaacgacccaaaccggccaagctcatcactgggattgaggtgatggtgccggagtacatcacgactggggaacgtattttggtcaatacgacaactggggcgtttggtgggcgggcgagctgaattagcagtcagaagatagacgctgaggcaatagcaatgtgacctgctctgtatgcagcggggacgcggggcagcttcaattcgccacaagattcaacacgacagttggcagtacatctgcatcgtgatggcagcggtcgggatggtgcaacgcgtttctatcaggcgttttgaggtgcaatcgggaaggttcaccatagggtctcagtcacatagcagccgcgaggatgtcaggtgcgccccattgggagatctgggttgtttgacacaatggacaaggcgtgctggatgcgctgtttaggggtcaaatactttccctgggttcaatatccattttgggtcgaatgcgcgttttagttgacgcattaatgcaatttcagcagggctgcgggtgctgtgaaggtagggcttttttatcaggccaatgccatgttctgcggagatgctgccgcggaaacgttgtaggaggtcagcaagcagtgcggtgacgtgttcgcaggtgtggatgaagtcagcctggggcactgtgtgcggtttcaggacgttaatgtgtaggttgccgtcaccgatatggccgaaccacaggacttcaaattctgggtaggcttggctcagtaatgtttgtgcttgttctagaaacgcaggcatagcagcaatgcgtacggcaatatcgtttttatacggggtatatggggcaatgctctcggtgatgctctcacgcaggcgccatagttgggctgcctgtgcgtcgctctggctgatgacaccatccaagacccagccctgctccatgcaggtttcaaagacagtgagtgcggtggtttcttgggttgcgtcggcgcaggggaattcggtgacgacgtagtacggatagggatgttcaaacggtgcttgggcaccgtgggctagaacatggggcaatgcgcgctgcgtaaaaaattcgaaggcttcaatctgtagttgtgcgcgaaaggcggcaaatacttgcatcaagacgtcaaaggtgggcaatgccagcagcatgactttggtcggtggcggtgggtcggtcagacgcaaggtggcttcgacgacaatgcccaatgtgccttcggaaccaatcatcagatgtcggaagtcatagccgctggagtttttgatcagtgcatgattcaacgtgaggagttcgccagtcccggtcactacgttgaggccagcgatccattcgcgggtgttgccataacggaccacgcggattcctcctgcattggtcgcaatggtgccgccaatggagcatgagcctcgggcggcaaagtcgacgggatacaggaggccgtgttggcgggcggcggcttggacggcctctaatggcatgccagcttgcacggtcatggtgcgatccatggggtcgaaccggagcattttgttcatccgctccagactgagcaccagttcgccattggtggccatggcaccgccggataggccggtgcgcccgccggaagggacgatcgcaatgtgggcatcattggcccaacgcacaatggcctggacttcttggacagtggcaggaagtgcgattgctaagggtgccggtgtgaagcgccgggtccagtcgcggccatagtgctgtaagtcggcaggttcggtcttgagacgcagcattggaagggtttgatgcaaggaggtgaggcgggagtcattcatcggatcacaggggcaaaacaattaagcgcagaacaatagatgaggagggcgcaggctgctagggatagtggtaagggcacccgtgcagcatggtagcggggatgggtttgtcacgctgacaggagcggttccgcgcaatctgcacaaacagaaagattcatctggcatagtcgcggtttcatttcactctcattgatccggtcatgccaccgacgaaaacttcttttcccaaacaagacatccgaattttgctgctagaaggggtcagtcacagcgggatcgaaacgttccgcgcggcgggttactcgcagatcaagatccatacaacatcgctgccggaagaggcactgcaagcagagattgcggaagcgcacatcatcggtattcgctcgcgcactcaattgaatgcagaggtgctagggcatgccaaacgtctgatggccataggttgtttctgtatcgggacgaatcaggtggatttggatactgcggaattgagcgggatccccgtgttcaacgcgccatattccaatacgcgtagtgtggctgagctgatcattgcggaagcaattttgttgctgcgggggatcccgcagaaaaatgccgaatgccatcgtgggggctggtccaaatctgccatcaacagtcatgaagcacgcggcaaggtgttgggcatcgtgggatacggtcacatcggtacgcaagtcagtgtgctggcggaggcgatggggatgcaggtgattttctacgatattgaatccaagctctctttgggcaatgcgcgtccagcggcaagcttggatgagttgctcggcattgccgacgtggtgacgctgcatgtaccggaaacggcagcgaccaagaatatgcttggtcatgcagaattggcacgaatgaaaccgggggcgcatttgattaatgcatcgcgcggtacggttgtggagattgacgcgctggatgcggctctggtgtcgggtcatctgggcggggcggcagtggatgtattcccaagcgaacccaagggcaacagtgatccgttcatctcgccattgagcagacacgacaatgtgattttgacgccacatattgggggtagcacgctagaagcgcaggacaatattgggattgaagtggcagccaaattgatccgttatagcgataacggcagcacgctatcggccgtgaatttccctgaagtcagtttgccggagcacgtggggagtatgcgtttgctgcatatccaccgtaatgtgcccggggtgctgtcgcatatcaacgagctgttctcgcgtcacaacgtcaatattgatggtcagttcctgcgtaccgatgccacgttgggctatgtggtcatcgatatcggcgccagtcagacgcaggctctggcattaaaagaggcattgacgcaggttcccgggacgctgcgtacccgtctgctgtactgagactaagttgtaatactgcttgtgttgttccacgcctattggcaaggtaagcgtcacttgatgttggctgtatacccgccaattttaagatttatgactcacgcgaccatctatcaggggggaggaacgtcgcatgctcaaaaaacatttattcatcgtcaaaccgatcgagccgacaaatcacacagggacaggtaaaggggaaacgcaactcaaaagatcgctaacggcaggacagttagtgatgctcggcatcggggccgtgattggcgctggtattttcgtgctcagcggacacgctgccgccgagtatgccgggccagccgtggtgctgagctacattctggcgggaattgcctgtgctttggctgggttgtgttatgcggagttcgcggcaatgctgccggtctccggttccgcttactcttatgcctacgcgacgctgggggaattcacggcttggttcatcggctggaatctggtcctggaatatatgttctctgcctcgaccgtggcggtcggctggtccggttatctcaatagttttctgagcagtttcggttatgggctgccagcctcgctctccagtgcacctctggacgtagtcgatgggcggctgatttatagcggtggcctgatcaatctgccggcagtcgcgattgtggccgcgatcagtgggctgtgctacgtcgggatcactcaatcggccttcgtcaactccatcaccgtggcgatcaaagtcagcgtcatcgtgctgttcatcgctttcgccgcacgctatgtcaacccggacaactgggtcccctttgtccccgacaacgcagcaccaggcaagtacggcatggagggggtgatccgcggtgcagccgtggtgtttttctcctacatcggctttgatgcagtctccaccactgcgggagaagccaagaatccgcaacgtgacatgcccatcggcatcctcggctcgctcgccatctgtacggtgatctacattgccttctccggtgttctcaccggcctgatgcattactcgcagttggatacgcccaaacccgtggccaccgcgctggaaacctacccaacgctgtcatggctcaagcatgtcgtagaaatcggcgcgattgcagggctgagttcaacaatgctgatgatgctgatggcacaaccgcggattttctacgcgatgtcgcaggatggcctgctgcccaagttgctgtctaaagtgcatccaaaattccagactccccacgtaggtacgctcctcgtcggtgcctgtgcctgcactttagccggactgtttccaatcagtctgcttggcgatttggtctccatgggcacactgctagcgttcgcgacggtctgcattggcatcgtggtactacgccgtacccgcccggacctgcctcgccccttccgggtccccatgtactgggtgatcgcccctgcaggggcggcagcctgtctgtacctgttctggcagccgttcaccgagcactggccgctgatggtcggttggacggtactcggcttggtgatgtatggcttatacggctatcaccacagcaaattacggcgcggtggctaagcgataagcagtcaggaggccggcgcaacgtcggcctctttcactattacactttattaatttcctgacgcgctatgttcaaacaactctgggccaccaaactctctcaacccagccaggacagtgccgaaggactcagcctgcaacgcgtccttggagtgtgggggttaactgcactgggtatcggtgcagtgatcggcggcggcatcttcgtcattactgggcaagccgcggccaatcacgccggaccagccattatgctgtcgttcgcactcgcggcgatctgctgtacgttctgtgcgctggcgtatgccgaattcgcagcgatggtgccggtctctgggagcgcctacacctatacctatgccactttcggtgagctagcagcctggttcatcggttggatgctggtattggaatatggggtttctgccgcggcggtcgcggtgagctggagcggctatttcctcagcttattacagcatctgggcatcgatctgcccgccgcactagtgaatgcgccattggacggcacgctgcacgccactggggccattgccaatctgccagcagccaccatcgtgctgctgctgacctggttgtgctacttcggcatccgtaagtcctcgaagatcaatatcgcgatggttgcactcaaaagcgggctgatcttgctgattattggcgtcggctggaaatacgtgaaccctgattactggcaaccgttcatccctcccaatcaagggccgggcaaatacggatgggatggtgtgttacatggcgcgtcaatggtgtttttcgcctacatcggttttgaagcggtgtcggtggccgcgcaggaatcacaccgtccacagcgcgaccttcctatcagcatgatgagtgcgttagcgatctgcaccgtgctgtacatcatgatggccgccgtcatgactggattagtcccttacacgcaactgggcacagacgagccagtcgtcaccgcagtcgccgcacacccccaactgggctggctgcgcgtcgtggtcgaaatcggtgcattggtcggactgtcttcggtcgtgttggtgatgctcatcggacaaccgcgcatctttatgatcatggccggtgatggcctgctgccaccgatattcagcacaatccactccaagcaccgcactccgcacatcaacacggtgatcaccggactaggtattgcgttgctcgcagcggtgttcccactggatgtactcggcgaactcacctcaatggggacgctgattgcctttgccgccgtctgtgccggcgtgctgattctgcgctgtactcggccagatctgccacgcccattccgcatgccggcagcatggttgttttgctccgctggtgtactcagttgcattaccttattgtcagcaatgaccaggcacaattggatgctgatgagcgtgtggactgttcttggttttgcactgtacttcggttacggatatcgccacagcaaactgcatcgagaaagcacctgagacaatgaatgccacttccacaccatccctgccctacgacgcgaaccgtctgcgcgaattggcgcatctgttgatcggcacgatcggcgaattcgctcaagcaggctggacaccagccaccagtagcaatttctcgcaccgtctggatgaacatcatgtggccatcaccgtctccggccgcgataaacgatgcttgacggaagaggacattatggccgtcgacttggagggcaacgccgttggacatccccatactccctcggcagagacgttgttacatactcaactgtaccggcgctttcctgagattggctgcgtattgcatacccactcgctaacacaaacggtggcctcacgggtgtacgccggagccggtcacatttctctgaaagattacgagctactcaaggcctttgaggggcacagcacccacgagacaaccttggatgtgcccgtcttctgcaacactcaaaatatgaatattcttgctgcccaggttgacacactcctggacaaacaacggatgtggggatatctgatcaacgggcacggaatgtatacctggggcaacacgctcgccgatgcgcgccgccaccttgaggcattggaatttctgctgcactgcgaactgaacctactgaaattacgtggctatctttgatacgccgctccctttgccatcgcatcacccttcatcatgagccgactacgcatcttcgacgatcacacccccgatacgccgttcttcgtcagcaaggagcagacacagatcaccgccgagttgcacaagattggcatcacgttcgagcgctgggaagcgactcaagcgattgaacccggtgcaactccagagcaggtcatggcggcctaccgcgctgatattgatcggctgatcgccacacatggtttcaaaaccgtagacgtggtcagtattgctccggacaatcccaagcgcgaagaaatgcgcgccaaatttcttgaggaacattttcacaaggaagatgaagtccgtttcttcgtcgctggttccggattattcaccgtgcacagcggcaacaaagtctatgaaatcgaatgcgttaagaacgatttgatcgcaatacccgatggcacccagcactggtttgatatgggtgccgcgccgtacttcgtcgctatccgctttttcaccgaaccggatggctgggtgggccatttcaccggcactgacattgcacaacgattcccccgctatatccccgagggctgccaaagcgcgcactgacaatgagcatgcctcaagcaattctcacggatattgaagggaccacaagcagtctttctttcgtcaaagacgtgctgtttccttatgcgcgccgcgccctccccgactttgtccgcgaacaccgtgaacacccggacgtgatgccttggttagatcaagtcgccaacgaaaccggcacagcgttctctgaagaagctctggtagccaccttgcaaacgtggatcgacacggatagtaagcacaccgcactcaaagcattgcaaggcatgatctgggcatccggttaccagaacggcgatttcaccgcccacctctacccggatgcagtccaacggctgcgcgcttggcatgcagccaacgtgccgctgtacgtgtactcatccggctcggtaccggcacagcaactgttcttccgccacagtcatgcaggcgatctgagcggactgttctccggttggttcgataccgaaatcggtggcaagcgtgagtccaccagctatcaacgcattgcagaacacattgggattgcgcccgccgggatcgtctttctatcggatgtgatcgaagaattaaacgccgcagcacaaatcggattgaacacggtattgattgatcgccgtgacgattatccaacgccacgtcatctcaaagacgccgaccaccatctgcatttggatagttttgcccaactgcccttttaaatcggcgcgttattaccgtcatcccggcacctcaatccgcaacgaccgctcagcagaacaacagtaccgctggcccgttgcatcctgataacgcgctcaaaaaacagccgcatctggaagcgcttcatcaatcctctgcaacagccctgctcgtcctcattaatttatcccgccggaactcagccacggcaacgctccgcgctgcgggcaacacgccatcggcattaacgatgccgtgcctctaatacagtaacggcatcggcaagcgataaaccacgggcgcgcaacaacacaatcaggtggtaaagcaggtctgctgattcatcaaggagtgcatcatcgacctggaccacgccagccaatgcggtctccaccccttcctcaccgaccttctgcgcgatgcggcggacgccctgctcaaacaatgcggtggtgtaactgtcttgtggccgctcacgttcacgctccgccaccagcgcatccagcgcaccaagaaactgtccaggcgctgcaggaaaacaactggtcctgcccagatgacacgtgggtccacggggtcgggcctgcactaataacgtatcggcatcgcaatcggcatcaatggccaccagatgcagcacatgcccagaacgctcgcccttggtccataaacgctgcttactgcggctgtaaaacgtcaccaggcggctgcgctgcgtgacctctaatgcctggctgttcatataaccaagcatcagcacgcgcagcgtatcggcatcctgcacgatcaccggcagcaagccgtcacccttggcccaatccagatcaggcaatgcaacatcgctcgtcgcaggctcattacacatcgcggacctcgatttgctgctcacgcagaaactgttttaaacccggaatcaaaatcgcgccgctatggaatacgctggccgccaatgcaccatcaacatcagccttgtgaaatacatccgcaaaatgctgcatgttcccggcgccgccagaagccaccaagggcacctgacacagtgcccgcgcctgagacagctgtgcaatgtcgtaaccacagcgcaccccgtcgctgtccatgcaatttaatacgatctcccctgcccctaggcgctgcgcctcaacaatccaatccagggtgcgcagcggcaaggcttgggttttatctggatccccggtattgcagcggacgcgccactgaccatcggcctcacggatcgaatcaatgccgacgacgacgcattgcaccccaaaggcttcggctaaggcgctaatcagcgcaggttggcgcagtgccggtgagttgatcgaaatcttatcggcaccggcatgcaagacagcacgggcagtctcaacctggccgataccaccggccacacaaaatggaatgtcgatcaggcgcgcgacgcgttcaacccaacggtaatccacagaacgccctcgtggactggcgccgatgtcataaaacaccaactcatcagcgccatgatcacggtaacgcaaggccagttcgacgatatcgcccatatccacgtggtcacgaaacttcacgcctttcaccacgcgtccatcacgcacgtccaagcatggaatgaggcggcggctcaacatgaccgcctctgcgcctcttgctgcaactggtcacggtgtagtgtgcaacggcgatagggccgcatccgcccattggcacatggcgtccccggcgggagacacactgcaagcatcacactgatttctagcgacatactggctccgttagttccccgcaaggcaagggatcgctgggatcggcaacactgccctgctgcactgcctccttgagtgcgaggcggccctccaacagcgctttaccgaggacgatacccgcacaaccggccatcttggcggcgacgacatcggccacatcccgcgcgccaccagacacttggagctgcactgcagggaccaaggcccgcagatacgtgtatacatccatgttgggaccggacaacatgccgtcacgggcgatgtccgtacacaacagatggcgcaacccagctgctgcatactgctgcgccagcacgtccaacgttgcctcggcaacctcggtccagccatgaaccggcaagcgccacacgccaccagcatcttggcgcgtgtccaatgcgacggtgatccgttcagggccgaaggcctgcaaccactcaatgacacgcgccgactcgcgcaccgccaatgaaccaatcaccacacgtgccgcgcctgcgtcgagaatccgcgcaacatcatcacgggaacgcacgccgccgccggtctgcacctggagtcctgttgcacgggtcatctggcgcaacaagggtgccaaggtatacccgcccgctttggcggcatccagatcaaccagatgcatccacgtggcgccactgtcggcaaacgccagtgcgcgcggcaatacctgatcgtcatagcgcgtctggcgcgcgtaatctccctgctggaggcgcactacagcaccgttacggatgtccaacgctggatagacaatgaaattcatgcggcatccatttcaagaaaattacgcaggatacgtgcgcctgtttcggccgaacgctctggatggaattgcgcgccacaacgcactccctgctgcacaatcgcggtaaacatgccgccgtgatcgcaggcggccaccgctgccgtggtcaagggcactgcatagctatgcacaaaataagcactcgccccctcgggcacctccgccagcaatggcgaagcgcgcagcggcaacaagcgattccagcccatgtgcggcacacggatgctaggagcgggcgtcaggcggcggacgcggccaggcagcaatgctaagcagggcacatcgccttcctcagagtgctcaaacaacaattgcatgcccaggcagatcccaatcagcggcacttgcaaccggagcaatggctcaatcaagccttgattgttgagccgtgccatcgcttcaggtgcgctcccgaccccggggagaatcacccgcgcggccccctccagtccgcgggcatcacacactaagcgcggctctacccccaaacgctgcaaggcgtagcgcaccgaaccaagattggcaccaccggcatcaatcaaggcaacctcggtcataacgcccccttggtagaaggaagcacgtggccgtggcgttgtaacgcctgacgcaaggcacgcgccagcgccttgaaacacgcttctactttgtgatggtcgttgtcgccatgcacgctcaagtgcaagttcatcccggaggcatcgcacagggagcggaaaaagtgcggtaccagttcggtgggcatatcgccgacgcgctcacggacgaaggttccttcaaagacacaatacgggcggccgctgaagtccaacacagcgctggcttgggtctcatccatcggtagggtaaagccaccgtgtgccgccgcgccgctcacctgccacggcagctggggcggatcgaatccatagcggccaataccgcgtttgtcccccaaggcttggcgcactgcctgacctagcgccaagccggtatcttctatcgtgtgatgttcgtcgatatgcagatccccaacagcactgatctgtaaggaaatgccggcatgtttggcgatctgttcgagcatatgatcaaaaaacggtaatccggtggtgatccgcgcctggggtgcgccatccaaatcaatctcgacacggatggttgtctccttggtgtgacgctgtaccacggcgcggcgcggcgcatcggccaaggtgtgagcaatgccgtcccaatcccaatcaccaccaaattgcggggtacgcaattggaatccgcgaatgttgagattctcggcaaattgcagatctgtggggcggtcgcccaccattgccgagcgcgcccaatcaatgtcgcgatcttgaaggtaggcgaccatcaagccgatgcctggtttacgggtgggcgcgttgtcggtcggccagctacgatcgatcagcacatcgcggaagacgatgccttggctactgaaaatctgcagcatcaacgcattggggccatcaaagctggcttggggatacgcagggctgcccaatccatcttggttggtgacgatcacaaagtgatagccggcatcacggagcttcagcaatgccgggatcacgccgttgacaaggcgcagtttttcgtaggcatcaatctgaaaatcaggcggctcttcaatgagcgtgccgtcacggtcaataaacacgatgggggtcatgcgggcaccgcctggatgtcacgcaacacggccaggagacgtgtgttttgttcgggggttcccacggtcagccgcaaggcatcatgcaactgcggtgcggcacgctggtcgcgcacgacgacgccagcggcgtacagcgcctgaagcgcggcctcggcatcatcaaagcgcaccagtaggaagttcccttgggagggatagacgcggcgcacgccagacagacaggccagggcggcacccaggcgctcacgctcagcacggatctcggccacacgctgtgcggtcacttgcaacgcggcggctgacagcccctgctcagccaggctcacgcagggggtgggcaagggatacggtgcttggcagcgacgtaatatcgcgactaaatgggcatcggcgatcacgctgccgatacgcacggcagccagggcatgggctttggacaaggtacgcagcacgaccagatgtgggtagcgggccagcaggggcaccacggaagggacatcggagaattcgccgtaagcttcatccaccacgacgagagcagtgccggcaagtgtctgcaagatggtctcaatctgctgtagcggaatcgcggcaccgaccggattagagggtgagcacaagaacacgagtttggcgcgggaggtctgtgcggcagtgatgatcgcaggcacgtcggcatggaagcccgcggcgtcatcaaccaaagggacttggatcactggggcgttctgcaactgtgcggaaacggcatacatgccgaacaccgggggggtgaccaggacgggatcacatcccggttcgcacacggcgcgcaccagtaagtcgatcccttcatcactgccacgaccaatcaatagttgctcgggaacacagccgtagagtgccgccagcatctggcgcaacttaggcggttgcggttctggataacgtcgcatggtggcgtgggaatcagcgggattgggccaggccgattcgttggcattgagccagaggtcaccggtcaaagcgacactgcgcgcggaggagtagccagcaaagttgcgtagttcttgacgtaccaggtcaaggaccgtaggggtctgtgtgttcatggaactgttcccatccgtaaggcgacagcattggcgtgtgcatccaatccttcggcacgcgccaaggtcaatgcacagtcgccaatttcagcaataccgctgcggctggccgcttggacgctgatcatgttttggaagctggagacgctcacgccgctataggcgcgggctgcaccgccggtgggcaaaacgtggttagtaccgctgcaatagtcacccagggcttcgggggtgtagtcgccaaggaagacggaaccggcggctgcgacgcggtgcagccaggcacgcggttggcgcaatgccaaaatcaaatgttcgggcgcatagcggttgctgatgtcaaaggcagtctccagggtggccactttaatcaaccgggactgcgctaaggcctgacgcgctatctcggcacgggatagctgctgcaattggagggcaagggcagtctgtaccgctgtcatcagtgcatcactgtcagacaacaggaggacttgggaatccgggccgtgttctgcttgggagaggagatcagcagcgataaacgcaggattggcggcggcatcggcgatcaccaggacctccgaggggcctgccggcatgtcgattgcgacgacgccggcttgtgcaagctgttgtttggcttcggtgacaaagctatttccagggccaaacactttgtcacaggtgggcacgcttgcggtgccgtaagccatcgccgcgatggcctgggcgccgcccagtgtgaagacccgggtgactccggtgagacgtgcggccagcaggaccgccggattggcgcggccatctttagagggtggggtacacaagacgacttcacggcagcccgccagccgtgcggggacgcccagcatcaaggcggttgaaaataagggtgcgctgccggcggggacgtacaagcccacgcgggcgatcggacgtacaagccgttcacacaccacaccgggcgccgtttccacacgatagccgttggtcattccggcacggtggaaagcttcgatccgggctgcggctgtctgcatggcgtgctgtagttctggggcaacggccgtggccgcagcggccagctcggccgcagtaacctcaaacgtggccaggtcaacaccatcaaggcgggcggtgatgtcacgcaaggcagtatcaccgccgcgacgcacttgttcaattaaggcggcaacggcctcacgggtttgggtggcgatggtctgcgcgggacgggtcagtgtctgggcctgggccgcggtatcaagttggttccaatcaatgattttcatgcgagggatcgctctacggtcaataccatcaagccctgagcaccagcacgttccagttcttccaaacgctgccaggtgatggtgccatgacacatggtctgcacgcgtagggtgccgctgccgtcatcgggcagctgtaccaaggggtcggcatcgggcagtaagtgggtcaaggcgtccaggtgttcttggaaggcacggaacatcagtaagttgctgtcacgcagggtgagcaggccatccatgcgccgcagcagcatggccaagagtccggcacgggcatcggcaggttggcggatcatgccggcaagcacggcttggctctccatgatttggatgacgggtttgagttggtgagcggccaatgtggcgccggaggacactaaatcacagatgaggtcagcggtacccaggcgtggggcgatttcgaccgagccggagagttcgacgatctgtgcagcaatgtgatgtgtctgtagccagtcggtcaagatcgcggggtagctggtggcgatgcgcttgcctgtcaattgcgatatatcttgccactcccattcttcaggcaccgcaagcatgagtcggcattggccaaagtgcagtccacgtagggtttggtagggaacggggaggccgttgcggcgccgtgaggctgcctgttcatccagttcattacgacccacgatgccaaggtcgcacacgccctgggcaatcaagccgggaatgtcgtcatcgcgcaccaacaatagatccaccggcagcgattcaccatagcaaaacagtttgtcgcggctctgacgccagctcagtccgcaagccgtcaggaggcggcgggccggttctgtcaaacgcccgcttttttgaatcgcaatacgcagtcggtcgcgtaccggtaatgcggtggacgcactcactgtggtttctcaatggagctggcaggaggcatggtctggacctgcaataccgctgcatagccgccggtaccgtgttcaagacaacgcgcgacacggccgatggtggtgacgctgatgccggtgtggtcgtggatgtcgcggtagggccgaccttggagcagcaagggcacgacgcgccagcggtcggccagcgcttccaactcggctggggtacacaggtcacggagaaaggcaaggactgtggcgctgtttctaaggcaggcaaaggcgtcggctaatgcctgtaatgcggcggtggtatcggtttggggacgggggattggacgttgtttcatcggggaatgatatagcgaactattacattagtacacaggggaatggaaaggatcccatgaaatacgatgtgggatagataacagcagaccccatcccctgcccccgtttgagtgctgcgccgccaggtcatacggaacacgtgtctcaactgggcagggtccggagaggtgcggtcgggcctgaggcaacgcgatagattcagcagtagcccaatacgctgcacgtcagtgattgggatcgttcctctcatgcaccgcttcgccatgcgtcacaggaggacgatggaagctcgcatgacgcgttctgcatcgcagccagcaatggctgcggtgcggatctcctagggacgtggtaggagcagtgcatcatcgacactgtaaagccgatctgcccagggaggcggtgcacgccgtcggcacatgtcaagcgggggatgagggctgaaccagtggaagcagcactcggtggcaggcctgctgcggctcaaagaggggcgggtgttctctggggcatgggagacgcgattgccgcagcacggcggcggtcacataaccttggcttgctccagttcgacttgcagggtgctcgctaactcttctcgtgggatctcaaattgctgttcacgggtcaggtctttgacggcaaccacgccacgcgcccgctcatcgtcaccggccaggacgacgaaacggatccccgcacgggaggcatattggaattgtttgctgaccttttttgcttccatctgtacttcggtattgattccgccgatgcgcaggcaccgggcaatgtccaaggcatcgtccagtgtggcttcatccatcaataccaccatggcttggacgctgctttctgcaatgccatccatcacaccagcatcacgcagttgccagaacagacgggttaaaccaatcgagatgcccacgccaggcaatttcgattgggtgtaatgattggcgaggttttcgtagcgacccccggagcagatggaaccaatctgggggtgattgatcagcgaggtttcgtacaccgtgccggtgtagtaatccaaaccacgggcaatggagaagttcaggcggtaggcgtgttcggggacacccaggacgttgaccagagtcagcacttcacgcaattcggcgacaccttggcgcagcatctcgtgtgcctctggccctgaatcttcgatcagtgcatccaggcgcaccaatgcatcggcatggctggtggaacgggtggcaacaaaagtcaggatattttcgacctgcgcggcaggaataccgaagccctgccctatcaatgtgtctctcacgtcgaggacaccgcgtttatcgagcttatccacctcgcgcaagactgctaattgcaagtcgccgtcacgcactccctggctctcaaggaagccccgcaatactttgcggttgttcaattggacttggaagtcgccgatccccagttcggaaaacacggcatggatgaccgccaggacctcggcatcgtaacggatgctcagggtctgtttgccaatgacatcaatatcgcattgataaaattcacggaagcggccacgctgggcgcgttcgccgcgatagacacgctgcatttggtagcgtcggaacggaaaggccaagacgtgctcatattcggcgacatagcgcgccaggggcacggtcaaatcaaagcgcaatgccagttccggtaggcgggtcgctccggattcagcggcattggctagggtgccggtggattgcacgaaatagacttgacgctctgtctcaccaccagatttggtcaataagacatcagacagttcaaacaccggggtttctactggtaaaaacccgaaacgctcatagttgcggcggatgacatccagcatgcgctggaaggcaatctgttcgcgaggtagcagttccaagacgccaggcggcgtgcgaggtttgatcacaaacgcaactccaaagtaaatagataaaagcagggcgccattctaccggctgcaatcgcttccggtggcatggcatccgcggaaaacctcgaaatatcgcaacaatttcgcagcaacactcggaaacggggccagtctctatcacctgaagacgcctgggcagcgtctgtggaaacaccgctgcggtggcactggggcatctcaggaggacagtacgtcacacggcaataggcacagcgtcagcgctctagccactcagtaggatcagagatccgctcagatccgcactcatgcagtggcacacacatgctgcgttaggtggccagcagcatgtgccgcaatgccgggtactctggggcgagcggttcgtcgcgcgcgggacgttgcaggaggctatccagggccgccggcacgggcacggtggtaccgatcaacggttctaccacctgctcaaatttggctggatgggcggttgccacaacggcccaattcccagcgacgccctgggtacgcaagtgctcaagcacaaacaccgccgtagcggtatggggacaaaatatctcgtcgtagcgacgatgccgtgcggtgatggtctggcggatcgcgatgtcgtcgacggaataggcggtaaaggcggcacgcaatgcggcgtcatcgccgcgatacaaccagcgcaatcgttcaaaattactgggcgctccaacgtccattgcattcgccaacgtcgccacactgggctgggggcggtaatgtgctccggaaaagtaatcagggagtacgtggttggcgtttgtcgccaacacaatctgtcctaagggcactcccagggcgcgcgccagaatcgcggccaaggcattgccgaggttgccggtgggcacaatgaggttcagagggcggcccgtgctggcacggtgggtcaaggctgcatgggcgtagtagctcatctgcggcagcaagcggcccaggctgatgctgttggccgaactcagcggcacggctgtttggaggctggtatcgttcagggcctgcttgaccatggcttggcagtcatcgaacacgccagccacacgcagggtgtgtacgttgtcgccaaaacaacccaattggtgggcctgacgtggcgatacacggccatccgggtacaggacgacgacacgcaatccgggttgccgatgaaatgccgccgccaccgcagcacccgtatcaccggaggtcgccaccagaatcgtcaagggacgttcggcatcacgtcgtagccgggtcaggcaggcggccagaaaacgtgcgccaaaatctttgaaggcagcggtggggccgtgaaataactcaaggacataatcttcaggggtggccaagggcagcagtggtgcggggagatccaacgcttcggcacagatcgacggtacatgcacttccagcggatcgcccgcaaagaagggggtcagtagtgcggtggcggtgttgatgaaatctgcgctgtggtccaagtcaccaagggatggcaagcactcggggacatataagccgccatccggtgctaagccggcagcgattgcctggctgagggtggccgccggcgctgtggtgcgggtggaatggaagttcatttgaatagagggtggaaagggaaaaaaatcgaaggaggcaacggtctcatagcaggcgcgcgcctgggctgatgagtggtgtcacccaggcttggctatcaaacccagccgcggtgaaagcagcacgcacggctggtgcggcggcttcggcggcactgcgtgtctggaaccaggcaaatacgctgggtccggcaccagagatgctcgcccccatcgcatcagcctgcagtgccgcttgttgggcggcagtaaagccagcaatcagcggggcgcggcgtggttcgatcagtacatcacgcagaccagcacgcaccagttcggcatcaccgtggtaacaccctgccaacaccaaggctaggttagcgctctgggtgacaatgtcgggcagcaggtaagggtctttcagaacctcgcgtgcacggcgggtttctagcaaggtatccggatggacaagcaagctgtgccaggcagccggtacggtcaccgggaccaggcgctccaaggtacacaggacgaggccgcccagaaacaacggtccgagattgtcaccatgacggctaccgctggcgaccgcttcgccatccaatgcatagcgatacaggtgttcacggcgcaatggttcctccaacagtgcgttggcggccagcagtgcagcaacgcaagaggcggccgaaccacccattccggaactcagcgggatgcctttgtcgatctccagttcaaagccaaagggcagagctaagtcacgatgcatggagagtaaggcggcaccggctgtattgcgttcggtctgtagtggcagcggctgggcaatcccacggattgcggcaatacgcacctgcggggtatcaatgcgccgcactgtcacggtgtcgccaacctggtccatggggtagccgagtaagtcaaaaccaacggcaacgttcgccactgatgccggtgcgaaggcgcgtgcctgatgcgctgcgggcgctgtttgagatgcgcctctgtctggttgcaaggtccgattcacaagcgtgcgccctcacccgctgcaactcgcagcaaatccgcaaaaacaccggctgcggtgacctctggaccggcgcccggcccctggacgaccaaggggttttcggaataacggcgggttgtaaattgcactacgttatcggtcaaacgaagattgacgaaggcatggtcagaaggcaattcaatcaagctgacactagggacgtgtccaggggacagttgtgcgacgtaacgcaatacgcaaccgcgctgtttggccgcagccaaacgctctgcaaaggtggcatcaacttcattgagtcgtgccatgaaatcggcaacgctgagttgacacaatgtctccggcaccaggctttctaccgcaacatcctctaggctgatatcacgccccgcatcgcgcgccagaatcaccagcttacgcgccacgtcaaccccagacaggtcatcgcgcggatccggctcggtatatcccatcgctcgcgcctgggtgatcaattgggagaaggggacgctaccatcatatttattgaacagccacgccagggttccggaaaagatcccttcgatcgaggtgacgctatcaccggtatccatcaagtcacgcaatgtcgtaatcaccggcaagcctgcgcccactgtggcttcatagcgaaagcgtgcgccgctggcatctgctgctgcacgaatcgcgtggtagcgatgcaaggggccggagccagcctgtttattcggggtcacgacatggataccggctgccagccagtcggcatagcgatcagccacctcagcactgccgctacagtcaatgatcactgcatgaggcagatgggcggcctgtaagtgtgcggtaaaggcatccagatcgaccgcctctggtacggcggcgaaggcgtggcgccagtcactccccaggccacgctcatccaataacatacgccgccgtgaaacgatcgcccgcaaacgcagatccagatttgccttggacagtaattgctgctgtgcagcacatagctggtccaatagggcctcacccacgtgacccggaccaatcacaccaatcgaaaatgtctggggtgataaccagaaagcagcgtgtgcagcgcgtagggccttcgtcgcctgctgactgtcgattgccaccgaaatattgcgctctgaagacccctgggcaatggccaggatgttgacatgggcgcgccttaaggattcaaacaagcgcgccgctacacccaggtgaccagccatgccgtcgccaaccgccgccaatacgctgatattgttggtcagttgcacgcgctggacatgccctatcgccaattcatgggcgaaggcatacaacaacgcatcacgtgcacgctcggcctcggtttggtgcacgacgcagcaaatggaatgctccgaagatccctgtgagatcatcacgacagacaaacgcgcattgcgcagggcggcaaacacgcgttcagcggtaccagggacaccgatcagacccgtgccttccaggttcagcacggccagtcctggactcagggtcaggcctttgacagacccactcaccacgctatcagcggtgatccgagtccccggatgtccgggctggaaggtgtttcgaatgatgatcggcacgccgcgtttcatcaccggcgacatggtttgtggatgcactaccttggcgccgaaataggccaattcacatgcttcgtcgtaactcaaggcatccagttgcaccgcatccgggacgacccgggggtctgcggacatgactccatccacatccgtccagatgtgaagctcatcggcctcaaacaacgccgcgaagatggcaccggaataatcactgccgttgcgacccagggtgatggcgcgtccagtacgatcagaggcaacgaaaccggtgaccaccacacgccgctgtggatgctgcatacgccaatgggccaagtgctgtgcactcgttgcccaatcgacttcggcaccaaactcaccaggactcacgacaagcacttggcgggcatccaaaacgacacaatcctcaccctgggcttgcaaatactgcccaagcaactgtgcggagtacacctcgcccaagccttgtaagcggtccagcacttcagatggcagcatcctgatgacggacaaggcaaccagcatttcatgcagttcattaaaacgggtgttcaaccagttttgcagcgtaccggcatgctctccaagcaaggcctgagcggcgtcgcaatgacgcgtgcgggtttgctgccacaacgcctgccagtcgggagaatgattggctgcctgttcggccagtgcgatcaacgtatccgtcacccctttcatcgcagaaacgatggtgacctgcacagtctcttcacgtgctaataggagacgcgccacatggcgatagcaatccgcatcggcaaccgaagtccccccgaatttgtgaacgacagtaggcgggacgtaaacaggagtttcaacggtggacaatcggacagcagacgatgacatcaacagacctcatgatagaggccccattctcatcaggctgtgggtttgacccgcaacctggagttctggtgcggggccatagtattcggaagttacgcgaagacgaaggatcgcactgggcacaggatgttagtgcggatcgtggcaatcatgccgactctcccagcaacagcaatgcgccgccaagccacaggcgtagtaagaatcaaataacagccggacttaaacatgaggtgaagaaaccgcagcaacactatcactgtcaagaggcgctccctatttgccccacatcacacgatcagcggcagctgaaatcacaatcagatcaatgaattaaaatcccgattgcgggcataaccgttacaatcggaatcaaatacaggcacaggcaacgacacggttgcgcggacacaggcggcttgccgtgctcacaacgcctagagattgactatctcaacctcacacacgacaacactacgcaatactgtcaggcgcaacccagtaacgtctccagcacggccatacggaccatcacgccattgctggcttgacgcaggatccatgactgcgggccatcggccacctcatcggtaatctccacgccgcggttgattggcccaggatgtaataccaccgcatccggagctgcacgcgccaggcgcgctgcggtcaaaccatagttggcatggtagtgctccaacgagggcaccaatccttcctccatacgctcacgctgtagacgcagcatcatcagtacatccacaccttcaagcatggcatcaaaatcttgactgacaacacaaccagagaggagtccgtcatggggcaataatgcagtcggaccgcacacccggatctgtcctgcacccagggtgcgcaacgcatgcaggttggagcgtgcaacgcgtgaatgtttgatgtcaccgacaaagagtagctttagcttggaaaaatcgttgcccttagcctgacataaggtcagcatatccagcagcgcctgcgtcggatgggtactacggccagcaccggcattgatcagcacggtaccctcaccaaccaccgcagccaactgtgcgatgacgatctcttcaggatggcgcactataaaaccgcgcacccccattgcctccaaattcttcaatgtgtcgcaggcactctcacccttgctcgtggacgacatagaagcatcgaaatttaatacatccgctcccaaacgctgcgcggccaggtggaatgagtgacgggtacgcgtggatggttcaaaaaagagtgtgcataccgccataccagctaacacgttgcgcttgcccatagggtcaaccccgagtgcacagttctgggcagcgcagtcaagtaactgcagcagtgtgtcacgcgacagtccttccaaagtgagcaggtgacgcaaacgtccatttgaatcaaattgcataagggtgatcgctttaaggttcaaaaaatcaaggaagcgatgtcgcctgcataggatcggcaagccaacgctcaaggatgactgcggccgctatcgcatccagggtgtcagcatcgcggcggcgcttgtacccagctgcacgggcaccagcgaaacggcttgccgcttcaaccgaactggaacgctcgtcaaccagtaccacaggtaatcgatagcgctcacgtaactgacacgcaaacgcctgggcctgtttacggatcggctggtcatggccttccaaggtgagcggatcaccgaccaccaaaccaacaggcagccaattgcgcttcacacgatccagggcattccagtccacggccacaccatgcacatcaatcaccgccaccgcacgcgcgccagccccccaggcgctacccacagctacgccaatccgacgtgtgccgacatcaaatccaagcacaatgccatcgggaaagggggaggatgcctcaggcatgcccggtatagtctgtcaaccgaaataaatccacgccaatgcgtccagccgcacgctgccaacgctgctccagcgcagtatcaaacagcaatgaggcatcagccggcaccatcaaccaattattttcgaccaactccaactccagttgtccggcagcccaacccgcacaaccaagcgccaccaacgcacgggaaggaccagagccttccgccattgctgtaaggacgtcacgcgaggtggtcagatacaaaccatcgccaatcagcagacttggaccccacacatgttcgctgtcataaatgacaaaaccacggtctggatgcactgggccacccgccaacaccacctgttcccgcagtgtctcagaagcggtttcaatccccatttgaaataacacctcaccaagggtgtattcagagggccgattaagcaccacccccattgacccattgctgtcatgctggcagatcaacgcgacgccgcgcgcgaaatgcggatccggcatcgacggcaacgcaatcaacaattgattgactaaggtcatagtcggcatggacatgagcgcattctatcgttcttgccgcagcagtgcctcagaaaatcattccgcatcttactcacactgatttttatgcctacacacatcagatactgatctccgtgtgcgctgcaatagcttcatgatccacagggacaccccattaggaggcgccaagaactgtcactgggtattcgatcattctgaagctgttcattcctggcttagcgatgatgcggcgatccatgcggatgagatgacggagatgaacggatcacgaatccaacgctcgttaaatcaattttggcaatgacctacacccgcgacgcaacaagcgctaacaaacaccgttacctataaataggctgagccatttcatctttcagccaaataaatgaacctgtcacaccataagccgctgatggtgtgacaggaaaaagcgataacattattttgatcggcaggtctgttgatgtcggcctttctcaccgcgcaggtcacttaagctcccaccacatccagaaggcgtcccatagccgcttaaagaatcctcccttctcgacgccagccattgctgccaacggtgcctgtgcgacgaccttaccatccagcgtgactttcaccttacccaccgactgtccaggtttaatcggtgcttcaaggttacgtggcacttcgatactgggtttaaggtcgttatagcgaccacgctgtacagtgacgaatagcggacgcgccacccctaactgcacttcggaaacttgccccttccatatcttctgtttgatcaccaccttgccaggctcatagagggtgtgagtctcgaaaaagcgaaagccccagttcaacaaggccaggctatcctcagcacgctttttctcggaaacatcgcccatcacaacggtcaggatgcgctgatcaccacgcttggccgaattaataatgcaatagcctgcctcggaagtatggcctgttttaataccatccacagaggggtcgcgccacagcagcaaattgcggttcgactgcttgatcccattgaccaccaactccttcactttgttataggcgtaggtttctggagaatctcgaatcaacgcgcgaccaagcagcgccatgtcatacgcactggagtaatggccctcagcactcaagcctgtcgcatcgacgaagtgcgaattcttcatcccaatgcgctgagcgtagctattcatcaacgaagcgaatgcctcctcgctaccagccacatgctcagccagcgcgatcgcagcatcattccccgactgcacaatcatgccctgctccatatcctccaagcgcgcagtcttgttgacaggaaagccactgtaactgccatcggtaccagcgcctcccttgcgccaagcattttcggtcatcatcacctgatcatcacgatgcactttgccgttcttgatctcagcagcgatcacataggaagtcatcaccttggtcaggctggccggagcaagatgggtatggatgttctccccagcaagcacctgaccggacgcaaagtccatcacaacccatgctttggccacagcaggcgctggcgccttgggaatcggtattgcaggagctttagtagggacaggctgcggaacttgcgcaacagccgaactcaccgcacacatgaagatagcaactgtcgcaaagagaaatttcaccgagagattcctcctgagacacccaaccgtggtaactggaaaattgtaatagacttcacttaatttctgagacgtttattgaaggaagattcattcttctcgaagatgtttccacgagcaaatataaagctgtctgtacactgaataatcaacgggcgacacctgcatcacctccgatgaagtgatgccatccattctctatgatctgtataccatcggagtacttaaaaactcggaatgtcactggatgaatcacaaaattgacctttacccctcccccttcgttcaatgatgtgtcgcatcacaccaacaaactttccgtgccaataacacaagctctgtaagaaaaagaagcgctgccagcagcagcgaccatgctgcaaaacccacccaagctggatagccactactccacagaccaagaccaaatgaaaacgacagcacagcccatgccgttgtcccaaaatgcgcgcgcaacaacacatatcagcgtgaacaccattgctgtactggtcaaagagaccaaccaatggccgtcattgcacatcatcgagcagtagggatagatacgttcggcgtgcgcgatggaacaccgcgcacgccaggatcatcacaccaaatcaaagcgatccaaatgcatgactttgctccaagctgcgacaaaatcgcgtacaaacttctcttgagcatccactgcggcatagaattctgctaacgcacgtaacagcgcattcgagccaaagaccagatcaacacgggtacccgtccatttcagcacaccggtgcgacgatcacgtccttcgaacacatgacgctctttggaaacgggggcccactccgtccccatgtcgagtagattgataaagaaatcgttactcaacgtccccagacgatctgtaaacacaccgtgcttcacaccgccaacgttggcacccaagacccgcaaaccgccgatcaataccgtcatctctggtgcagtcaatgtcagtaactgggcacgatcaatcaaaagatgctcagacgggacaacttcatctcccttgacatagtttcggaacccatcagcaaacggctccagaggagcaaatgaactgacatcagtttgctcctgcaaagcgtcggtacgtcccggcacaaaagggacctccaccacgataccggcacgcttcgccgcctgctccacgcctacaccgccagccaacacaatcaaatctgccaaagaaatgcgtttgtctcctgcttgcgcgttgaattcagtctggacacgccgcaatgtttccagcaccacactcagttgctgcggctgattgacctcccactggctttgcggagccaagcaaagacgccccccattcgcgccgccgcgcttatccgagccacggaacgtggaggccgatgcccaagccgtcgaaacgagctgcgagattcctaacccagaagcagaaattttctgcttcaacgcaagaagatcctgcgcatcaactaacacatggctgaccttaggaactgggtcctgccaaatcaactcttcaaccggaacctctggaccaaggtaacgcacccgcggccccatatcacggtgcatcaacttgaaccaagcccgagcaaacacatcggcgaattggtccggatgcgcatggaaatgccgcgaaatcttttcgtagatcggatcaaaacgcaacgctaaatccgatgtcagcatcatcggcagtaatttcttcgacggatcgtgcgcatgcgggatcgtcgctgcagcattcttagccacccactgataggcgccggcaggacttttggtcaactcccattcgtaaccaaacaagtgctcaaaaaaatcgttgctccattgtgttggagtcttagtccatgtcacctccaaaccgctggtaatcgtatcccccgccttgccgctaccgaagcggttgtgccaccccaagccctgctgctccaactccccagcttccggctcaggaccgacgttgtctgctggagccgcgccgtgtgtttttccgaaggtgtggccaccggcgatcaacgccacagtctcctcatcattcattgccatgcgagcaaacgtttcgcgaatgtcgcgagcagaagcgagcggatctggacggccatccggaccttcaggattgacataaatcaatcccatctgcacagcagccaacggattttccaacacgcgcgagtcgctattcttggcagccttctcctttgctcccctgtgttcatctggatggtgtacaccttccgagacagctccataacgaacatccccaccaagccaggtcgtctcccggccccaatacacatcctgatcaggttcccaggtatccacacgaccaccagcgaaaccaaaagttttaaaccccattgattccaacgcgacgttaccggaaagcacaatcagatcggcccaagaaatctgctgaccatactttttcttgatcggccaaagcagacgacgtgccttgtccaggctgacattatccggccagctattgagcggcgcgaagcgctgctggccacggccagcaccaccacgaccatcaccgatacgataggtgccggcactatgccaagccatacggataaacaaaccgccgtaatgaccaaagtcagcgggccaccaatcctgcgaatcggtcatcaatgcatgtaaatcccgcttcaacgcagcgtaatcgagtttctggaactctttggcgtaatcgaacgtttcacccagtggattggacttattcgaatgctgatgcagcaaatccacacgtaactgattgggccaccagtctttattgtgagtcccttcaaccgctgtcttattgaaaggacacttcacggcagaagtcgtttctggagatgatgcacgcatataaggacaatctttataaatagagaatacgaacagtgtatggaaaaataatgatttaaataaataatatatatataacaatccgatagttattcactatgaaccttatatcgtacccaatcgccatccattgcggtacaaatcaatcaacatctatttcgctacaacaattgccaggccatcaccgtcctaacgtatgccactcttggcttgccattagacacacaaagatccgatgaaccgtacaagccaaagcacttccaccacacatgatggaagcatattgacggcaggcacgctctttaccatccgctctgaaaaacaatgcaacacctgccgtcaatatccggaagaaaatcctaaaacaagtattgactgcctgactgcacttcggaaactgattatcgaggcaactattctccaacgattgttaaaaacatccctgaaataacccgaggcctcctgttcagtgcccctcattcgaatagacccacagatggcatggttcaaaccttctcgccaaacgctttggcaagcgcccgatatgccttgcgctgtgtctcgtttgtagctaaaggagcagtgatttccaactcaacgatctggtctcctggcggaggaccaggcaaaccacgaccgcgcagacgcaacttgcgtcccgcatcggaatccggtggcaccttcagctccacagatccgccgagagtcggcacgctgatcgaagtccccaatgcggcctgccatggtgtcacctgcacagtgtgcagaatattgtgcccatcgacttcaaattgcggatgcggggcgtattcgatctctaataagagatgacgagcgtagctgccctgcccgttcagccgaatcaccttgccaggttggatacctttaggcacacgcacatcaagctgacgcccattgaccgtgacccgcacacttccccccctgtaaatggcttccagtggcaccgtcaacttagcacgcgtatcaccgtgttgcgatttggcgccaccccctggacctgcatgatgaccaccggcacgggctccagcaaataagctctcaaagaaatcgctgaaatgcccccccgacgcattgccaaacacctcttcaaagttaaaaccatgcccaccaccaaaattaggaggagcatggaattcctctccaggccgatacccttgtgcacggagctggtcataagccgcacgcttgttcggatcgcgtaatgcctcataagcctcgttgacggccttgaatctctcctccgcccccggctcctgactgacgtcaggatgatatttgcgcgctagccgacggtaagcggtcttgatctcagcctcacccgcactcggttcaacacctaaagtcgcgtaataatccttgaattgcatccgtcgtcacctcttacacaaggaaaagcccgcagcatcaaagccacgggccagccgaatctggccgaaacgcgcgctgacccaatatcacagcgaccaataagcatccaacgaagacttggatctgcgcgcgcccaccgaacatcacattgactgcaacgcaacatcgttggaaacagcgttaccaacctggatacgccgtggtgtcgtcgccgctcgtttcgggataaagatgctcaacacaccatgactaccactggccgtaatgccatcagcatcggcactgtctggcaatgcaaagcgacgatggaaactgccataacgacgctcaatgcgcgagaaatgttctgtttgactagacgactcagttttgcgctcacccttaatcgaaagaatgcccttatccatttgcacctcaatgtcagctggatcgatcccaggcaaatcggcatacaacacaaactggttaggttcttccttaatatccacgcgcggcacccactgcgcggtcaccactgcagactcatcggtatcaccgttatgttcgaaaaaacggtcgaacacctgtttaatctcattctgcaacgcagcctgaccaggccaaggggtataacgaacaacgttcatcgataacctccggacacgattgattgatagacgggttgaggcacctctaaaacacagtgcctttagtgctacagataagcacggcgacgctattttcaaggacccgaaggtattcttttttatctacttccctatgctattgatctaaaaaaataggcattcgtaccaataaacccattcaccaaagcgcggacgcaacaacacattgaaacaaaagacgagcactccctctcccccattgccgagatggaatgaaaacactttgcatcacacgtacttaacgtaaaacgcggaactgcatgctgttccaagcaccatcctcagccaacgcagtcaatagatacgtccctggttctgggaaatcacgctgaaaggtctgcccccccacagtttgagcaatccagcgcccatccaagagccagtcgatccgtgtttcactccccaaggcacgcaactgcagatgtaccggcttggcactaccaggtggacgctgcaatgtggcaccttcaacgagaccatcgatgtacagcaccccggcatcagcacgatcatcctcagaacagtctgaggccagccgaggcagatgcgtcgcacgacgctccacagcatcaagccatgggatcaccaacgtcggccaacgtgcaatctgctgctccctgatcagatgcggcagacgacaatcaggcctaacacgcaaaccactacgtacatcgacctggaatcgttccaaaccgctacgccacaatttcgcatcacgctcagcgaaggtcggcggcaccaccccatccaatacgtaggcactgtagcgccgtcggcacaattccggcggcgtgctagcagcagcaaaacccagcggccaacagatatcaacctgctccacactggctggcatcggctccggcacagcatcaccaggcgcgcgtggcaacgcatcaatcacatcaaacaacaacggtaatgcggtaatcgcaccatactgacctggcagcggagtaccgtccggacgcccaacccaaacacccactgtgtagcggcgggtactccccagcgcccaagcatcacggaagccatagctggtaccagtcttccaagccacggacggacgcatcgcagtatcgaacgtgcccctgccatacccagggcgcgggttagcagcaagaatctcgcgcacaatccaagccgcaccaggggagatcaaacgacgctcaatacgcggatcctccggggtataacgcacccgtcctgccacgccaccgcggttgaacgccgagaaggcacccaccagctcctgcaactgtgcccctgtgcccccgaggatcaacgccaaattcggggtggcaccacgtggaaaacgcaactgcacccctgcatgcgccagacgcgtcgcaaaccgagccggcccaatccgttccaacaaatcgactgcaggcacgttcaacgactgtcgcaatgcactggccgcaccaatggggccagtgaacgcagcatcgaaattacccggacgataatcaccaaaatgctgtggcgcatcgaccaacagactctcagaatgaatcaagccctgatccaacgccattccataaaggaacggtttaagtgtggaacccggcgaacgccaagcccgcaccatatccacgtgacccaaccgcttggcatcaccgaatgtcaccgaaccaacgtaggcacgtgcttccaggctttgattatccatcaccagcaccgcagcagaagtgcgctcaggtaacggcgagaaataggtactcactcgttcctcaagagtgcgctgcaaatcaatgtccaacgtggtcacaatgcgtgcagcatgtggccgttgcacacgcagacgctgcgccaacaacgctgcgtacattggtggctgcaatgcacgtgcgaccaccggctccagccgcgcatctttcacctcttcatcagaccagacaccaagcactgccatgcgtgccagcaccttatcgcgtgcttgccgtgccaactgcggattacggtccggacgcaaccggcttggcgactgcggcaacaccgccagcaacgccgcctcagcatgcgataagcgtgccgccgacttgccaagataagcccagcttgccgcctcaacgccctggatcgtccctccgtaaggggcacgttccaaatacaactgcaaaatctggtgcttactcaaatggacttctaactgtactgcacgcaacaactgcttgagtttgccccaaggagtacggccatgcggctcaagaatccgtgctgcctgcattgtcaacgtcgagccaccggaaacgacatgaccataacgcagccacaggcccccagcacgtaacaacgcccaaggattcacacccggatggcgccagaacatacggtcctcataggtcaacagagcctgcacatacaacggcgacacctgccccaactgcgccgggtagcgccatacaccatcagcatcagggaaggcacgcagtggagtgccatctcgcgcaaccaccagcaaagccatatcgtgcgaggtcggtaatggcaacgggcaaagcacatccaacagaagaagcagcgaaagcagtccagcacaactccagcgcagccaagtcaatgcacgatcatcgcgcaaacgaccaaacatggaggccgacaatgatggaagcacgaacatactcactgctggacgggatggctattgtgcctgctccaccaagacctcataaaatcaaagccttatgggaagttaacgagcgatcatgcgcttcggtcactctgcataggcgcgcatcacccttcaaacatatgatcttggaagtcagaaagtgggtcagcgcaacggattcaccaaggtgaccgctagcctatttcagtacgccgatccaacacaaagccatcttcaacaacacaagcgctaggacgcaaaacaaccttggttttttattatcaatgatcagtgacacaacaaatcaatacaccaatacacgatgctcaatgcaacgccacaacaaatcaatacctaaaacacctataaaaattattgtcagtaaataccgcccatcatttaacgcactagagtgcatcacccaatgacagcgcataagcactgtaacgggatcatcttcggataccatgctcatggtgtactgctagcacctatgatgctatgtagaaagcagcatcaggacgatattcgaacatctgcattcaccgcactttttgtgcgagctgcaacgcaaaaaacattcacgtatagagcaatttctctgattccccacacgcagatattgcagggtccttacgttttctccgattaccctgcattctccttgcttctttatttatgttagttaatcattaaactggcgtgttcgaagtactgtgcaccccattcattgtcatccctcaccccatatcttctggcaactgccgaagagccttgccaggtcggtattttctacgattgatcaagacactctgcagcatttctagagagagcaaacaaaaatgaaatttaagcccgatataccgcatcgcttgctcgtcgtatcactcgctattgcgatcgctacgttcgccacccccagcatcgtgttcgcccaagaaaaggagacaagtgctgctgccgtactggatgcggtcaatgtgaccggcactcgactgaaaagccaatcgatgaccgcttcaagtccagtagccgagattaatgctgaagaattccagtacagcggagcaaccaaggttgaagatttggtcaaccaatatccgcagttgtctttgaatttcgatggctttaccaacaatggctcggatggttacgccaccgtcgatctgcgcggccttggacctaaacgtaccctgaccctagtcaatggcagacgtattcctaagggcatccaagagactccagatatcacgattattccaacggcccttatcaaacgtgtcgatttactcactggcggcgcatcagccgtgtacggttcagacgcgattgctggcgtggttaactttgttcttgatgacgcgtttcatggcatcagtgtcaacgccggttactcggcgtatcagcacaacaatgacaacacctacatgcgtggcttgatggacaaagccggctacccttatcccaaaggcggatctggctttgacggtgtttcccgaaatatcgacttggcaatcggtggcaatttcggagaaagcggccatgccacgacttgggtcacttggcgccagaacgatggcctattacagggacagcgtgactattcttcgtgtgcactcacgcccaacggtaccggctgtggcggctcgctcaccgctaacccacctaatttcaacatcgtggcaccaacggctggcacatttttcgtgcttccttcagccaatgggacgtggtccaaaaccaacgcccctaacctttacaactatgcaccggtcaattactaccaacgtccagatacccgctacaccgctggtactaacatccagtatgaaatcaatagccatttcaaaccgtatgttgaagcgttgtttgttaatcaccgcagctcaacacaaatagccccctcaggtacattttttaatgaattaaaagtgaattgcagtaccgccgtcatcggtagcctgtgcaacgatgtgggcattactgacagcgcatttagtgtctatgttgccaagcgcaacattgaaggcggaccacgcagcaccaacaccgacacgagtagtggcagcatcaccgccggcactggtggcaacctcatcggcaactggtcctacgacgcttcattcacctacaaccgcagtgctacaaagtcagaaagtttcaatgactttataaccacacgggtgcacgacgcattattaggctgcccaactgggtcgttcgacggctgcgttccttacaacgtgtggacaaacaacatcagtacagccgctgcgcaatcactacaaggcgtgggtattgtcaattacaccacctcaatgaaagtgttcaacgcctacgttactggtgacttcggctatgcgctgccatgggcaaacaataagccaatcaatttagttgtcggctacgagtggcgcaacgaaagctacacccgtactgccgacagcaacacacaggctggcaattttgctggatcaggcggccctacctccaacgtagataatagtattagcgtcaaagagcttttcctggagagcgcagtcccgttgcttgccaataccggcattctgaaagagcttgatttacagttcgggtatcgccgttccaagtacgatgtttccgggagcaccaacacttataaagcaggttttggtgccagcttcgctgacggcaagtacctattgcgtggtggctggaaccgtgcaatccgcgcaccaagcatcaccgaactgtatgaacccaatacgattgcactctgggatggtagcgacccttgtgcagggacctctccaacgttcactcaggcacagtgtgccaacactggattggctgctgctcaatacggaaacgtcactgcaaacccaagcggccaatacaaccaaatcagtggcggtaaccaaaacctgaagccggaaatcgctgatacctggacccttggattcgccgccacaccgatcaaagaccttgatctgagcgcagattattacagcatcaaaatgaaggatacgatccgcgagatcggtgcatcaaatatcctgacagcatgcgctctgacaaacgatgccaatctgtgcagccgcatccgccgtaatagcaccacaggggatttgttcctcgggagcaatccagccacctccggcctggtattgaactcgcggggcaacttcggtgcattgcagttccgcggtatcgacttaaccgcttcatatgcctggaacgtcggcccagggcggttgaccaccaacatgatcggcaactacgtgatcaagcaggactatcaacccgtccccggtatcagtgagaacaattacagttgcgctggcattgtcaataccgcttgcggcgatgctgacggtcgtaaaggaggaatctccaaatggcgtcatatggtaaatgtgcgctacggctttgatcgttacacagtgggtctgcgctggcgctatatcggaaagatggattacgagaacacaaatggaacgccaggttcgaccgataaattacttgtcaacaacggcaaccgggtttcagcctataactacctggatttgaccgggtcaatacaactggataatgacatcacctggacgatgggactgaacaatgtgttcgaccgtgaacctcctctggtcggcagttcgttgagctataacggcaatgcgctgaggggctatgaccaagccggacgctatttcttcaccagcatagggttgaagttctaattgcaacgttaatcggtacgcattgatacaagcgacggcggggcaaccccgccgtttacattcaggcgattcgttcgaaccagtgatccacgcaacactgacgcatccaaccagaacgcgatgcaaaacggtcaccacaacgccattgcaaaaccttccaaaatatcggtagtaaccaccaacgaagatcacaaccacatcgtggaggcaaaccaccagtgggttaagccgcaacaacatcagcctgcacctcacgtcactcagaacttgctactgctgcggcatctctcacttttgcgtttgctttctctgccaagcatagaagtcttggccatccttgttaccacgctgatctggctgtaaggatataacgtcaccaagcgctacacgttacgaatcaccccacacatgcatcaacgggatcaacgaagaacacatctcattatggcttccaagaaaaaatgcatatcaaatgacacgccatcaaaaacgccagcgaacgtaatgaccacttgacccgattacatccacatgcgttgccagcgcctcatctcatcacgacgtatagcgcaggataatgaccatgaaacgcttgaggtgtgatctgttgatacgtttatctacccatcatcacgcggttatacccgcgaatgagtgaacgcacaccatcaaaccctgggaacatgagccaaccatcaactgctggcatcacgaagctggttatcatcaggaggatgtttccttgacgtcaaccccgacagatgatcgactacggccagccagataggagatacgttaacgtagtgctgttatttactaacaaaaagcgttgaactttatttgtcacactgcatggctacagcggcctatttcgttcggctcactcaggagtacggcccgatatggccgaaacaaaacaacctcagtccctagatatcgaattggttcggcgcgtgcagtgcggcgaatacgctgcattcgataccttagtacgcaaataccaacatcgagtcattgccctgatcggacgctacatcgccgattggagtgaatgtcaggacgtagcccaggaaacatttgtacgcgcctatcgtgggatctgcaattttcgcggcgacgctcagttttcgacttggttacatcgtatcgccgtgaataccgccaagaaccacctcgccgcacgcaaccgttcccggctgagcaatgaggccgaaattgaagaggctgaacagtttaatcacagcgcacacttaagtgacaccaacacaccagaacgagaactcatgcgccaggagttggaacaaatcgtgatgagcgcggtccaagcactgcctgaagaatttagaaccgcctttactctgtgcgagatggaagggttgagctacgaagagatcgcacaacggatggattgcccaatcggaaccgtacgttcacgtattttccgggcgcgcgaagcgatagacatcgaattacgaccttttctagagatcaacaacattacccgcaaacgatatcgtgtatgagcaaccatctgtccgaaactgctgacaagttcgaactgcacacccgactgcaattgtcccaactaatcgatagtgaactaccgatggacgaagcacgctttctgctacgtcggttgcaacacaatgaagaattagccaactgccaggaacgttggcaactgtatggtgacgtgctgcgtggcgttgcactggctcctgccccaacagactttacgctacgggtgcaagctgcagtggcggcggaaccaacacctatacgcactaaacaccgctggcgctggagcggtggggccgcgttggtcgcctccgttgccgcaatcatcttactaacagtacacgagtggccaacgatggcaccgccgttaacagaaacagaaatggtacttgcaaccaccgcacaactgcttaagcctcctgtatcgccaaagattgctgcaatctccgagttgcaacatggagacgttggtataacacaactgggcaaaacgacacacaaccagcaggctgcaccagaacatacactcgccacgattccggcaacacaggccccagatcgtctgaatccattcacacattacgacaccatacaaaccaaaccctggccgcgtactattctctctgctcaggcaccgtttaacgcaaacctgccggacaccgctgtacgtcatgcgttctatccattcgaaccacgactcccagaatcgcagcctatgtcctcacaggagtaagaccacctcctcacggacttcacgatgtcccttaccactcaccggtgtcgttaccccggtttgactcactttgtttcgcaatcaggagattgatctgatgaattcacgtatccatacacgatgcttcggcctactcgccatcaccttgccgttagctgcctgtggcgcgcaacacaacaacagccccactcccactgcaccctccacccccattgtgacccccagcaccaccccagcaccacagctcgtggctgggttgccagatttcacccaactggtcgaccaagtagggcctggcgtggtcaacattgaaaccgtcattacccgtaagaaagtcgggaaacgtcgcggcataccgcttgacaacgatatacccgagtttttccggcgtttctttggcccagatttccagatgccgaaccaacctcgtggcggccaggatgacgagggaggtatcgctggtcggggaatgggctctggcttcatcatttccaaagacggctacatactcaccaaccatcacgtcatcactggcgcgagcgaggtcacaatcaaattgactgatcgccgcgaattcaaagcaaaaatcatcggtagcgacgaacagtacgatgttgctttactcaaaatcgatgcaaaaaatctacccaccgtgcgtatcggcgactccagttcacttaaatcgggtcagtgggtcgttgcgatcggctcccccttcggattagatcactcagtcactgcagggatagtcagcgccctgggacgcagcaccagtgacgatcaacgctatgtcccatttatccaaaccgacgtacccattaaccagggaaattctggtggtccattgctgaatacccgaggtgaagtgattggtatcaactcgcaaatattttccgcctcaggcggctacatgggtattagctttgccattccaatcaatttggcaatcaacgctgccgaacaaatccgtaaaacaggcaaagtgcaacgcagtatgctcggtgtggaaatcggccctatcgacgcactcaaagctcaaggcctaggcttaccggacagccgaggcgcactggtcaataacattccaccccacagcccggccgccaaagcagggattgaagtcggtgacgtcatccgctcagtgaacggcaaagtaatcagtagcttcagcgatctgcctccactgatcggcatgatgccgccaggcaccaaagccaccctgggtattatccgtgacggcaaaccgcgcgagatcgtcgtcactctttcggcactcaatcaggatgcaacagccagcgaagatgaagacgacacagcaccttccaaaccagaaacctctgccaatgtcgaactgctcggccttcaagtcgaaaacctgagcgctgctgagcgcgaacgcctggcctcatcgcaaaacgcgaagggaggagtccgtatcacagcagtcacagcgccgtgggcacgcaacgccaacccgccattagtggaaggtttagttatcctaaggatcggccgcactccggttagcaatgtggcagaactgaaccgtgtcctaggaaattataagaagggagatgtcatcatgctgctggtgaccaacggccgtggcacgttctacagtgcgttgaaagcaggcggctaagcagtcacacaccggacaacacacactgcatctgccaatgcgtctgggcgtcccgtcattcctcgtcggcaacggaacacccagaccgaacatcatcaatactcaagtattcctgagtacgctcactctgaaccatgcgataatcctgcgctatcccgacgatggttccggtgccccatctccatgtcatccgatccgatgaggaacattcgcaacttttctatcattgcccatgtcgaccatggcaagtccaccctggccgaccgcatcattcagttgtgcggtggcctagaggcacgtgagatggaagcgcaagtgctcgactccaacccaatcgaacgggaacgtggcatcactatcaaagcccagtccgtatcgctgctgtataaagcacaggacggacaaaactaccatctgaacttaattgacacccccggacacgtcgatttttcctacgaagtcagccgctcattagcagcctgtgaaggtgcattgctggtcgtagatgcgtctcaaggtgtggaagcgcaatccgtcgccaactgttacaccgcagtggaacaagggctagaagttgtaccgattctgaacaaaatcgacctacccaccgccgatactgaacgggctaaggcagaaatcgaagcagtgattggtattgacgccagcgaagcagtcgcagtgagtgccaagaccggcctttacgtggagcaagtgctagaagccatcgtgcagcggatcccagcaccgcaaccacgtgataccgaaaagttgcaagcgcttatcattgactcctggttcgacaactacctaggtgtggtttcactggtacgggttatgcagggcgagatcacacctggtgccaaactgttagtgatgtccacaggacgcagccacccagtggacgccgtcggcgtcttcacacctaaacgcaagacactggcaaagctgaccgccggtgaagttggttgggtcaccgcatcaatcaaagatgtacacggcgccccagtcggggacacactgactcttgccaacgatccggcacccaaaccactcccaggtttccaagaggtacagccacgcgtgttcgccggcttatttccggtcgatgctgaggactatcccgacctacgcgaagcactggaaaaactgcgcctgaacgatgccgcactacgctttgaacctgaaaattcagaagcaatgggcttcggcttccgttgcggctttctaggcatgctgcacatggaaatcgtacaagagcgtctagaacgcgagtacgatctgaacctcatcaccactgcaccaacagtcatctatgaagtacttaaaacagacggcaccctcgtggcaatggacaacccggcaaagatgcctcccatcaatcaaatcaacgagatccgtgaaccgattatccgttccaatatcttgaccccgccagagtatgtgggtgcagtaatcacactgtgcgaggagaaacggggcagccaaatcggcatcacctacttaggaaatcaggtgcaagtggcctacgagctgccaatggcagaggtcgtgttggacttcttcgataaactcaagtcagtcactcgtggttacgcctcattggattaccacttcttacgcttccaggaagggccgtttgttcgggtggacacactgatcaatggtgaccgggtcgatgcactgagcgtcatcgtgcatcgtcatcaagccgaacgccgtggccgtgaattgtgcgaaaaaatgaaagacttaataccgcggcagatgttcgacgtcgcaatccaggccgcgataggatcacaaatcatctcacgctcaaccgtcaaggcgatgcgaaaaaatgtgctggctaaatgctacggtggcgatatcagtcgtaagaaaaaactgcttgagaaacagaaagaaggcaaaaaacggatgaaacaaattggtcgggtagaaatcccgcaagaagcatttttagccgtactacagatagacaataaataaactgggactggttcaaggaaccaagcagtaatgacatggctaatccacgtcgcttctgcccacttccttgcaccattccctattcccatcgtactaaggaatgcgaatgaaatggtttgaaatcatcttagtagtactgactctaggaacaggcattatctcattgctggacaagctatttctggctaaacgccgggccgcacgcgccggcttgcttgacaccgaaccgccgatcattgactactgccgttcattttttccagtactagcggccgtgctcatcctgcgcagcttcatcgcagaaccttacaaaattccctcaagctcaatgatgccgaacttgctgatcggcgacttcattttggtcaataaatttgcctatggcctgcgcttgccaatcaccaacaccaaaatcattccaatcggcaaaccgaatcgtggcgacgtggccgtattcaaaccaccacataaacctgacgagaattggatcaaacgcgtcattggtctaccaggagatcgcatcgggttccatggtgacaccctgtacatcaacggcgaacccgttaaatacatattaaaaggccaatacaccggcaaaaatgctggcgtaccggatccgaccctactcatcgaagaactaccaaaccatccacacaccatcctggaatcaatcggtcgtggccgtgaagaaggagaaggcgagtgggtcgttcctccgggccagtactttgtgatgggtgacaatcgtgacaacagcgaggacagcagattttggataaaaacacattttcttccagaacagaacctgcgcggcaaagccttcctgatttggctcaactgcgaaaactggctctgcaagggaagctttgatccatcaagaatcggaaccgtcattcgttgaatgaaagattggttattaccaaggaaaatctagtgaaacgcacgcaatatggaatcacactgagatccaccttaatttttacgatcatcatattttttacagtacatttcgctatccatgcctttctggtgtaccagaaatactactctctccagactgctatgaagagcttgaaaaaagagcttggcaacagcgatctagatccatccacgatcgaggaattgttcctaaaacgcatcaatattgactcttttgacaatgtgaaaaaagaaaacatcaagtttgaaaaaatcagagacggctggaaaatgaagatcaactttgaaatccttcgcaagcggattgggaatatggacctggtcggcacattcgataccgagcaggacttgacatcacgtgatatcaagtaaggccagcgattaccaacagcggatcggctatgtgtttaccgatccatctctgctactgcaagcactgcgtcactgtagtgccggcaccccgcacaatgagcgcctggagttcctcggcgacagcgtggttaacttgctgatcgccgaagcgcttttccaacgctggccacgtgctgacgaaggagcattaacccgtgcccgttccgaactggtgcgtgaaacatctctggcctcgattgcacgcaccatgcaattaggggagcaactcatccttggaccaggtgaactcaaatctggaggacaccgccgcgactccatcctcgccgatgcagtagaagcagtgattgcagccatttatctcgacgccgatttagcaacgtgccgtactgtggtgttaccgtggtttgaaacagcactcaccgcattgcctgttggtaaacccgaaaaagacccgaaaactcgactccaagaatggctacaagcacgccagtggtcattacccgtgtatgaattgatcttcgagagcggtgatcctcataccaagcacttccgagtgagttgcactctgggtgaactaaaactacgcaccgaaggcgaaggcagctcacgccgtctcgccgaacaagacgctgcctctcacgccatcgaccaactggattcaaacaagtgactcagactgtcccgtatcgttgcggtcgcatcgccgtgatcggccgccccaacgtcggcaagtccacactgaccaacgcactggtcggaacgaaaatcagcatcgtctccaaccgtccgcaaacgacccggcaccggttacttggcatcgcaacctttcctgagggccaaatcgtcctggtcgatacaccaggcttacaccgcgaacaaaagcatccaatgaaccggctcatgaacagaaccgcacgcggctcgctcgaagacgtggatgcagcactgttagtaaccgaatccacacactggaatgaagaagacaccctggcttacaacctactcaatgacacgggtattcctgtcgtactcgtcatcaacaaaattgaccgctttaaagacaagagcgcattgttacccttcctcacacacatcaatgaaaaccataccttcaccacaatacatccagtttcagcactgaaacggaagggactggaaacactggtgagcgacctactcgcactgttgcccgaaggcgaccccatgttcagcgaagacgagatcaccgaccgaagccagcgtttcctggccagtgaactcgtccgcgaacaagtcatgcgccaactgggtgaagaattgccctacgcaaccaccgtagagatcgagtacttcactgaaaataccggattatttcgcattggtgcactcatctgggttgaacgcgaaagtcaaaaagcaatcgtcatcggcaaaggcggtgcccggctcaaagagattggcgttaaagcaagacaacagatggaacgcttattccaaaccaaagtattcctagaaacatgggtacgtgtccgtaaagactggtccaataatgaagcagcactaaaaacattcggctacgaataaccccatcgcaacaaacaactttacactcccccggataccgaatcgcatcctgacatcacaaaacgcatccatacctgcatacgcgataacagtgcttacaatcgcatctaaacaaagctgtaagatcccaatcactgcctgggcatcccctttctcttcctgatctttccatgctgatcgaacatgaagtcgctttcgtcctgcacgtacgtccctggcgcgaaaccagtttactggtcgaagtactgacccaggcatatgggcgtcttggcttgatcgcacgtggtgtacaaggactgaaaaaacaaacattacgtgcagcgttgcaaccgctacagtggatccgattcagtgcgatacaacgtggcgaacttggccaattacgccaagccgaagcactggacactgccccacgcctcaaaggcgaagccatgttagccagtttctacattaacgaattgctattgcgcttagtgccacgccacgccccagtcaacgaactgtatcttgcctattcacagacacgggaacgcctacgcaccagtgattccttagcgtggtcactgcgcctttttgaacgcgagatactcgaaacactaggcgttggcttcaacctagaatgcgatgcaaacggtacaccacttgaccccgccacccgctatgttcttgatccattagaagggccacgccgtctactcagcgaacacaacaacgctaagcgacgcgacactgccaccggacacgtactcctggcattggcgcgcaaccaaataccaaataccaatgatttggctggcctacgccgcagcatgcgtgcagtcctgttacaccacctgggcggccgcggcctgaaatcgtgggaaatgatcgctgcattcagacaccaggacacatcaccgtaaatttcgaatcaccgcagcgctgcgcggatctccccacacaaccacaacgcagcagcgatgcactcacagaaccatcctgcgggacacgcctgcatgaccagatattgatgatctcgtacagctcaattacagaagatgaaacagaaacagtactgagctcaactcaccgcactcagcggatggttctgtaccgccaaatcaggccaacgacttaacagcgcagcatacacaccagccgcatcaatacccgcctcagccagtaaatcctcacgggaagcgtgttgctggaacgcatctggaagaccaagatgcacaatcggcaaaacgatgccttcagcgttaagtaattccgcaacccctgagccagctccgccagcaaccacattatcttcaatcgtgacaaacccttcgtgagtacgcgccaactccaacagcaacgttcgatccaacggtttgataaaacgcatattgaccacagtcaaaccaagcctacgccccacctgttcagcaggagcaacacacaccccaaaaccaagtagagcgatccgtgtaccagaatgacgtaactgcgccacaccaaccggcaacacatccaactcagcggacggcaccaccccaggacccgtaccacgcggataacgcaccgctactggcccagaatagtggaaaccggtactcaacatcttccggcactctgcctcatcggcaggagccatcaacatcatgtttggcacgcaacgcaggaaactgagatccaaattacccgcatgcgtcgcaccatctggaccaaccacaccaccgcgatctactgcaaaaagcacatccaacttctgcaacgcaacatcgtgaaccaattgatcgtaaccacgctgcaaaaaggtcgagtaaatcgccaccacaggcttagcaccttgagtcgccataccagccgccaacgttatcgcgtgctgctcagcaatggccacatcaaaatagcgctgcggatactcctgactaaaacgcaccaaccccgatccctcacgcatcgccggtgtaatagccagcaaacgtggttccaccgctgccatatcacacaaccactcactaaacacgtccgtatatgtttgcttctttgctcccgccttaatcagacccttttgcggatcaaacggggcgacggcgtggtaaccaatctggtctccctcagccagctcataccccttccctttggttgtgatcacatgcaacaactgtggacccttcaacgtacgcaacgtcttcaacgcaccaagaagggccggcaaatcatggccatcgatcgggccggtataatggaaccccatctcttcgaacaacgtcgacggcacaaacatccccttccaatgctcctcccagcgacgtaaaaaacgcgcggttgcattggttttcttatccccaaaaattctcttgccaccctcacggatcgcattcaatgctttgctgccagtcgcacgaccaagcatcttggtaagcccaccgaccgcttcggaaatcgacatacgattgtcgttaagaatcacaagaagattcggtgcaggactcatcccgccagcatgattcagcgcctcataagccatccctgccgtcatcgcaccatcgccgatgatggccaccaccttacgctcatccccatgacgctgcgccacaatcgccatcccaagcgcagctgaaatagaagtagaagaatgaccgacaccgaacgtgtcatagatactctcctcacgcttcggaaacggtgccaaaccaccttgatgcttaaccgtactaatcttgtcacggcgaccggtcaatatcttatgcggatacgtttgatgacccacgtcccagacaagatgatcgataggagtgcagtacaaataatgcaaagcgatcgtcaattcgaccacacccaacccagcagcaaagtgaccgccactgaggcctactgattcgatcagataattccgcaactcatcggcaaccgcacgcaactccgactcctgaaaagtgcggagatcctctgggatttggatacgcgacaagcgtggataacaagtggaatcaatcatcgtcttggcattacaacggaagcaccattgtcctccccataatggacccgagcaagcaatccggtgaagcataaagatgacattgatgactgacctaatgcgcaacaccggaacctcaaaaacaacaacacttcagaaaatgttagacacatcccccgcatatcctgacgtcgccaaacacccttcaaacacccctagcgtcaactgatatttcaaaactactcacaacaacgcattcaaaaatccgatccactgccactctcatattgagaaccttcccacgttcgataaaccacctcctatcggattgatgccatccactgaacatcacacactcaccctgtccgatttgtgttcattgaaaaatgccgcctgcacagcaacacagcaaaactcaacgatcaatccacattaataaacatccagacatctaacacaccctccatttgccacaacaatgcccccttaatacttcaaatacagccgccaacaactcgtatcaatcgacaccgacttctaacccaaacaatccgtacagaagaatgccgcacctcggaacccgaggtcgcggacactccaataccgtagatcttttaatgctaagcgaaccaattgggcgacattttggaagcacctaatccagtctcagcacgtacctgctgcgccttaaacgcaacgcgctccttcgccgcccgaccactacgatccagcaccgaaaacaaccaaataccgacaaaccctatggccacggaaaacaatgccggcgacgtataaggaaatcgcaccgaatccactgaatgacccaacgtatcgacccacaccgaaggtgataacaccgtcaacaccaacgaagaaatcaaaccgagaaaaccaccgatcaccgcaccccaggtcgtacaatttttccaaagcagcgacaaaatcagcaccggaaaattagccgacgccgcaatcgcaaatgctaatgacaccatgaacgcaacattctgcttctgaaacacgatccccagcaacaccgcaaccacacccaatactgccgtggtcacacgcgagaccaacaactcagtatccgaagatggcttaccctgcttaatcaccatcgcatacacatcatgtgacaccgccgatgcaccagacaacgccaacccagccgccaccgccaaaatcgtcgcaaatgccacagcagaaacaaaccccataaatacatccccacccactactttggcgacaagcaccgcagccatattggctgcaccctgcccaccacggatcgtgccagtggcgatatcggcatactgcggatttgttaacacgaacacaatcgcaccgaaaccgacaataaacatcaagatgtagcaataaccgatccaggtaatcgcccacaacaccgaatgacgcacctctctggcatcgggcacagcaaagaaacgcatcaggatatgcggtaacccaacattaccgaataccaatgcgatacctaatgaaatcgccgaaattggatccttgataaaactacccggcgccatgatcgatagccctaacgctttagcctcctccccagatttaccccccgccatcgcgatttgcgtcttaactcccaccgcactcgcaaacaggccctcaaaattaaaaccgaacctccacatgatcatgactgccatgaaagtcaaacaagtcaacagcaacaccgccttaataatctgtacccaggtggttgcagccatcccaccaaacatcacgtacaccatcatcagtccaccaaccaaaatcactgcgacccaataatccaaaccaaatagcaacttaataagcgcaccggccccaaccatttgtgcaactagggaacacaacaccaccaccaacgtactcgcagaagtgaacaaccgaactggcaccgccgcgaaacggtaagcaaccacatcagcaaaagtatatttgccaagattacgcagtcgctcagcgactagaaaaaccagaatcggccaacccactaaagaaccaatcgcatagagcattccatcatacccactgatcatcaccgccgaggtaatgccaagaaacgccgcagcagacatgtaatcacccgccatcgccaaaccattttggaaaccggtgatcgtccccccagccgtgtaaaagtccgcagacgatcgcgtcctcttcgctgcccacttagtgatccataacgtaatcagcacaaaaacaacaaaaattgagatcactacccagttcactggctgtttatcgaccacacttatcgcatctgcagcaaaccccaacctcactggcaacaccccaaacaacaccaaaaaaagacgcatgcctatgttcatttacaggcatcctcaagaatgctgcgacttaatttgtcgtagacaatgttggcaaaaaagacataaaccgcagtaacaacaatagcgaacagcatcaccccaattgcgatcgggataccacgtgtcgtgaccccgctagcgagcggcacagcaagaaacgccttgttaaaagcaatcagaccgataaaaccgaaataaacgaccagcatcaataaagttagcaaccaactcagcacattacgttgccgcttcaaagcatgatatttacgattagcatcaatcttctcgacgattaaatcgccattagaaacgttcatgcatactctctcaaaaatgatgatgccggttccccctaaatcatagaaatagtccggcatatagggtcctcaaaactacctggagcgatgcatcagcgtcaaaggatgcattgagtcacgtattacacacacaccatcgccccactggccatttctatttcgtactaccaatcatccattcaacatcgccattggccatgaagcaatgaggattagcaataaaaaaagcacaacaaccactgcatgtatgacaactcatactgaaattattcacctgaaaggtagacattagccaagcaacatacctaaacaagatttggatttattaactatccccatacacccgtacaacacataccaaagtgcatcgaacaatcacgcccgttgatccactatcgatcaaaccatcacctccaccagagtccaaacacaagtccacaatgtggaagcgatacggcacacctgtaggtcgtcaccagaacgccagcccattcccatcgcattgacaacacagctgagaatcccatgtctgacctgtacaccattgatccgatgttggccaaagatgcgcacgtagaccgtgctcactacaaaacgctttaccacgaatccctcgaacaaccggaagcattctggagcaacatcgcacagcgcctggagtggttcaaaaccccaacaaaaatcaaagatgtcagctaccaactagaagacgttcacatccgctggttcgaagacggtgaactcaatgccagcgtcaactgcctagaccgccacctcaccttacgcggcgacaaaacagcactcctgtttgaacctgacgcccctgacgccccatcctcacgcatcacctaccgtgaactgtacgaacgtgtctgccaactcggtaacgcactgcgccacctcaacatcgaaaagggcgaccgcgtcaccatctatttaccaatgattccagatgcagtcgtcgccatcctcgcttgcgcacgcattggagcaatccactccgtcgtcttcggcggctttgcaccgaactccattgccgatcgaataaacgactgcggtagcaaactcatcatcaccgcagacgaaggcctgcgcggcggcagaaaaattccattgaaagccaatgttgatgccgcattaaagatccacggaacccaatccgtcgaaaccgtactcgtcgtgcgtcacaccggcggtacgatcaacatgcataccccgcgcgaccgctggttccatcacgtcgtcgacatccaagcgaccgaatgcgccccagaacgcatgaacgctgaagacccacttttcatcctctatacctccggctccacaggcaaacccaaaggagtgctgcacaccaccggcggctacctggtgtacaccagctacactcatgaaaccgtgtttgacctgcgcgaaaacgacatctactggtgcactgccgacatcggctggattactggtcacagctacatcgtttacggccccctggccaatggcgccaccgtgttgctgttcgaaggcgtcccccactacccaaccgtgtcgcgcttctgggaagtgatcgacaaacatcacgtcaccctgttctacaccgcgccgaccgcaatccgtgccttgatgcgcgaaggcgacacccctgtaaaaaaaacctcccgcaaaagcttgcggttgcttggcagcgtcggcgaacccatcaaccccgaagcctggcactggtactacaccatcgttggcaacggacgctgtcccattgtcgacacctggtggcaaaccgagacaggaggaatcctcatcaccccactgatcggtgcaaccgaccttaaaccaggctcagtcaccctccccttcttcggcatacgccccgccctagtcgataccaacggacaaatactggatggccccgcagcaggcaacctagtcctcctcgattcctggccgggtcaaatgcgtaccgtctacggtgaccaccaacgttttatagacacttactttcgcacctaccccaatacttacttcaccggcgacggctgccgccgcgatgccgacggctactactggatcactggacgtgtggatgacgtcatcaacatctccggccaccgcatcggcaccgccgaaatcgaaagcacactcgtcgctcaccccaaagtggctgaagccgcggtcgtcggcttccctcacccgatcaaaggccagggcatctacgcatacgtgacattaattaccggcgagacacccagcgaagcactgcaccaagaactgctcacctgggtacgtaaagaaatcggagcaatcgccacacccgatcacgtgcaatgggcacccaacctccccaaaacccgctccggaaagatcatgcgccgcatcctacgcaaaattgcagaaaacgcaccagaccaactcggtgacacctccacactggctgatccgtctatcgtcgacttattgctcaacgaacgactgacacactgacacactgacacacaaaccccacacgggatggggtcatacaccatgtcctcatcccagaataaaccttccaacatctccccttccaacatctcatttctttgcatccccatcgcagagacagacaccttccccaacaacgcatcaagacacgatcgtcaacagcatcgctatacaacagaatcacagcatcgctatagctataaaagtatgaaaaaaaacaccactacctagtaaagacaccgcactaagataatgaatcaacccacaaacataacaccccaatttcacccacatcgcaaccacacaaatacccccatttcacatggccgcgcaacgctctaacagtgccgtaaccctctctcacatcaaaacgcatagccccggctatatataaaagtcagatcaagattcacatttcatcgaaaacattgattaccacgaccgcactgctacactgccttccccttggggagtagcctgcttccacacatctggaagcgctcgcgtcaacacactcggtacatataccgtggcgcagcaaccatcgtggtttggcgagaccaacggctcgtgtacgcaatgctggttgggcgtgaacacggaccgttgctcagcgcccgacccacgagaaatccccatgtcccctattacaatcctattaatcggtattgcaatgtcgacagacgcttttgccgctgcaatcggcaaaggtgcggcaattggtaaaccccgcctgcgcgatgcactgtacgttgccgtgattttcggcgtgatcgaaaccgccactccaatcgcaggttggctacttggtcaaattgcatcgcactatatcgccaccttcgatcactggatcgccttcggcctcctcagcggcctgggtatacacatgatcgttaacggactcaaaaacaatggcaacacctgcaaagacaatgcagatacccacaaccgtaacagtagatggctgcccctagccgccacggctctagcaaccagcattgatgcagccgcaattggcatcagtctggcgttcctggatatacatattagcatcgtcgccgcggtaatcggcctatgcacattcaccatggtgatcttcggcgtaatgctagggcgtgtcctgggcacatttgtaggcaaccgtgctgagattgtcggcggcatcatcctcatcatcgtcggcagcaccatcctgtacgaacacctaagcaacaatggctaagattggtattcaacacataaaaaaccataccaatctaaagatataccccaccaacattactcaagcttattaattcaatttatttaattatttttaattacaaagaaattcattttataaactctcacatcatcactattacataacacataaaccattcaaatatccacacaatacatttatataattaccgcaaaaaagcaaactcaaatggttaaaataaggttatttcaaaatcattaatagttagaagccatcagtggattacaatcaatagagaatcattaacatagatcatctctccagatgaatattaattacggaacattagaattgcttgaagtgaatatttccacacattcagaatggaagaaagagccatgaagaaaaaatcctcattcaaaagaaaaattccgatcatcatattttttatcaccgccaccatctcctatttcatgataatatcaaatgaaacaaaagttggcgtcgactatcaagcggatgctatttcaaaacctaccctacagacactcgtatctatgtcatgggcgaaaggaaaagatttagatttttcaatgaaaagcttaagcaactctttaagtcaacatatattatccaatcaatgcacatcagaagaatgcttagaaagacttggttttaataaatgcacccattccgaagaaaaaataaaatgcaaatataaagcaaaaatattattagtaaacaatgattattcacacagcaagaagaaggaagatgaagtcatcatcaacattgaatccaacttctctgaaaataaagtaatttcgtcaatacatcattacgaaaatgcacgaccttttaattaacccatagaagctaagcaccaataagaactaaaatttcatgggtatttaatacaatcacatcactagattaaaaaattgaaatgcactcaaatatcattcaaataaaatatctcgcataacaaaccaccctacgcgaaataaatccgcattaaatcattacattaattttctcataatctcacaactagaaacctcaaaaataaattaaaaatacatgagactttcaaactagcatcgcgacaaaaaaagtaagcaatttctcataaaaattttatctatcgatctgctcgataaaaataatcaaattctcctaataattagaattacatctcattatttatcaataaataaacgataaaacgtgatcgcacacacgtattatttatcgagaaatttcactatccaaaatgttacataaacaacacctgatctcctgctggaatcagagcgctctacctgtttatcttgaatttatggacaccgtggggagggagaggaatctaacttcaaccgtatttattaacatgagaatgaataaaatgatgaaaatacaacgacacaggtttagattaagcagacttactaccgtaatgttacccctcctgctaatcgccccccctgctccctgcttgctacacaaaattccctctcgaaccacatcatccaatccaacctaaacactgctttccccaccggagactcctggcttactgctggtggaggcctgctgaacaccaattttcaaccggatggatggctgattgattcaagcaacaccacacaactgcaaatgcaatggagcctgtccacacagggcggactccctgcatcctcaaccatcgacaatcattccctatacgtatcaagctccaacggtacattaaacaagatcgatacccagacaggcagcctcctctggtcgattccactctccaactacaccggaaaccctcattcactctcacttaaaagcacagcgattgctccccaaagtatcgtcgtcggcgaccaaaacagcggcactttacttgcattgaacaaaacctccgggacactgctatggaaaaccacgattgaacccaacctcaacgcaaaaatcacttccccaccaactatctacgaagatcgcgtctacgtcggcgtctcctccggaaaatcacaaagcaacatcgcagcactggatctaaagactggtcaaccgctgtggcaatccaacagcgttccaaacggcgctttgattaatggccccctcaccattaacccatcaaaaaaacgtctctatgccctaacaagcaacagcggccaagcatcgccattgcacaaccacaccgacaccttactggtattggacatgaaaaatggcgcattgctgttgaagcagagcctgaaagaatcaacggatcccaataccgagaacgccaataaaaacggcactattttattcacattgaacatcaatggcacaacacgagacgtcgtggctatcccagaggcacaaggccactatcaagtgttggacgcaaacaacggcactatcctatggtcaactgacatcatctcagggagtaaaaacagcattgttgcaagctccttcaatgcttacaaatcacaaatctacgtcatatccaaagccaacaatgcacagatacacaatgactattacctaacggcactggatgcaaagaccggaacaatactctggaatacgaaagtgcatggaaacaaacctatcaacgccaaactcaataccggaggtggaatcgcatcatcaccggacatcatctacaccagctcccccaacggcaaaatcaccatgctggaagcaaacaccgggaaaatactgtggtcgttcgatacccacgcctcaatcatcagcgcccctgtgatgaccaatgatgcgctgtacgtaggtgcaacattcactcacaacaccggcaagctgtacaaattcacaacacaagaacacctgcaaataaataacctccagcacaaccagcaacactctctgatcaatcacatctcggaacaaaaggaaacaaacggcaatagtgacagccatggtgacagccattcaggcgaaggcagctggagtgaaagtggcagtggcagctggagtggtggtggtggtggtggtcaaggcagcggcggcggttacggttatggcggcggcagcggtcagggcagcagcaacggttacggcggcgactatagccgttacagcggtaactacggcggtaattcgtctagaaatggtgcttacggcggtaaccctaaagactataagcacggtcatgacagcaaagataactacggtaacagtggttcaatgccaggcaatgacaatacggtcaataagcaacagtaaactccgcacttgtggggcagggacacccccgcctcacaaaccgcaaacctcctttcagaggagcgtacgtcgcagcacgcaatgcacagcaagaaacgtacccacgtcaatatcactagtagcaaaccacatcgcttctacccagctttctgactacaacattggccgcctacccgctgatcacctcaagaaaaagcaagctgaccatgacggagccgcccacactgctgatactggaatacatgatcactcactctcgactacctgcttcatgctctgggtacctacatcgtcatccaacgtgtcattgaccaatgtacttcttgagccaagcattcaccgtgtcatgccattgaatactgttctgaggcttaagcacccaatgattttcatcatggaagtacagcaacttggactcaatgcccttacgctgtaatgccccaaacgcagccaacccctgctcaacaggaatgcggaaatccttctggccgtgaatcaccaacatcggcacccgccacttgtcaacatgcaacaccggattgaattgctcatagccagcaggattctcccacggcgttccaccgttttcccactcactgaaccacaactcctctgtggcatagcccatcatccggttatcaaacacaccatcatgatcaaccaagcatttccacggttgattccaatgaccagcgatccaatacaccatataaccgccataactggcacctaatgcacaggccttatcaccgttaagaaatgggtactgctgctgcgctgcggcccagcctttttgcaaatcttccagcggacgatctccccagtgctgactgatggcatcggtaaacgcctggccataccccgtggagccgtggaaatcgatcatcaccaccgcatagccctggcccgcataggtttgcggattccaacggtagccccaactgtttccaaaactaccctgtggaccaccatgaatcaggaacgccaccggatactttttacccggctgataatcatacggtttgaccacataaccatacaccgtctcatcattccagcctttgaaactgaactgctcgaaatcacctaaacgtacctgctggagtacctccccagttgccgaagtgatggcctgcaacggcccccgtgccaccgcatccgtcacgaagatctggtcagcgctcttgagagaattacgagcgaaagccaacttcccaccagccaacaccggcgcatgcacactgccttcacccacccacttctctaccttgcccgaagcaatgtcgaccttaaacaaaggatgctccccatgatcatcggcattgacatagagcgccttaccatcggctgaaagtgcaatttcatcggcagaacgatcccaatgcggagcaatctcacgcaccttaccgctctgcacctccatttccatcaggccgaaacgatccgcctcaaaaccaggacgccgcatcgcgcggtaatacaacatcttgccatcagcactgaacatcggcgttgcatcccacgctggattggccgctgtcaaattgaccggcgcatcatggccagacacatcaaagcgatacaaatcaaagttagtcgaccaaggttcttgacgaccggccacacggatactcgccaccacactgtgtccatctggtgaccacacaaagtgatcggcaccaccgaacggctttgacggaacatccccatcaagcattgcactcatcgccgacacaacactcaccggcttggcaccgaccgccggcagcgacgcaatgaacagcgtgttacggcgcccatcattccaagtatcccaatggcgtacaaacaactgttcaaacaccacaccactggccttggcgtttttcttctcatccaacttccgcttagtacaactcagatctgaaccacagacctgaaacacaccggcactgaacacaatgcgatcaccctgcggagaaagcttataactatcaatatccacagccagattggttaactgccgcgacgtcccgccactcaccggcaacacgtacaattgatgacttcccgacttggcactaagaaaatagacagccttcccatcacgggaaaaaaccggcgcactcacatcccatcccaacggagtaagacgcaccggcgcagccgatgtacccgcctgcaaccgttgcacccacacactggtactcgccttgatgtacttagcgtccatctggcgtttagcgaacaccagcacggcaccatcaggactcaactctggggaggacactcgatctaaagccaccatatcgcgcacatcgaaaccgcgggccgcagcaagtgcaggcaaaacaaacaacaaacacagcggcaaagcataacgaagcttcatcaacgctctcgcaatgggaaagcggcgatagtagtccgatctaccagcaactaccaacaacacacacccatacgcacaccgcctgtgcatcacccaagatgcatgcgatgcaaaacaacagcagcgtactgcaaacatccctacaaaaacccgaaagaacgacagagcgtgatccctatttcactccatgcagcaacgtcattcaccgacactgccgcagcaaacgctaagtgactgatgcagaaaattcccgatgaaatacgcagcagtagtgcagtgcagaacgcggttgtatttcaacaaaagcaccttctgttccactgcacacacctgaatacttcaaacatcgccgccgcaacgatgactgctgaacttagacagcataaaaacacgcctcacccaacaaccaacagagcactgcacctacacacgacgcttactcacccgatacaacagccatcccacaaacgccaatatcgccaacccaaaccactgattgcactggaaagcctcaggtaatgccagcacatcaggatgaccagaaattacgattggtactgcaatcaaaatccccatcagtgcctccccggtaatcaaacccgcagaaaacagcactccgggacgatgcaaacggtcacgctcagcctcatcaccacgacgcaccttgtgagcacgctccacaccatatgacaacacgccccccaagaaaatcggcaccatcaactccaacggcaaatagataccaatcgctgcggccagcaccggaacacggaaacgtgcaccacgcaccttgagccactcatcaatcccaatgatgaaagcgccaatcaacacacccgccccaatcatcgtccatggcaactggccgccaaacagacctcgagccaccgacgccatcaacgttgcctgcggagcactcagcgcattcggatgctgctgtgtcgctggaccaatcccatacgcatgtgccaacaaattcagcaccggtgccatgatcagagcacacgagaacgtgccaatccccatcatcacctgttgcttccacggcgtagcacccaccaaataacctgccttgagatcctgcaaattatccccgcccaccgctgccgcacagcacaccaccgcaccaatcataatcgcagccacggcacccaacggcgcaccaccactcccgatcggcaccaacccattgcggcccagaagcaagaccaataccgctgaagcaaacaagatcgtagaaatcgtgataccagacactggattattagaagaacccaccatgccagccaaatatcccgataccgacacaaacaaaaaaccagccacgatcataatcatcgtcatcggcaccgacacctgccattgctgcacgatcgactgatacaacagcagcaacggcaacgtaaacgccgccagcgccaccaacatccaggtcatcggcaaatcgcgctcggtatgcgacaccacctgaccgccccccttacgcgccgcagcaaaaccgcttttgatacccctcagcaacgatttacgcagtgaaaacagcgtccatacaccgccaatcagcatcgtacccacaccgagataacggatcttttccccccagacactaaacgccgcttcggcagccgtcaccgtcgccagacgctgtgccaactccggatcactccccatgaagaattgctgatagagcggaatggccacatgccaggacagaattgaacctgacaacaccacaatccccacattcagacccacaatgtaaccaacccccagcagcgccggcgacaaattggtaccgatataccccaccaccttgctgctccccagataagccgcctgcgaccaagtatctggaatcaacttcaaaccactggcagcagccaacttcactaaagcaccgatcccaccagacagcgccaaaattttaagccctggcccaggattctcacccgccttcaacacctcggccgcggccttgccttcagggaacggcaacggctcctcgacaatcatcgaacgccgtaatggcaccgaaaacagcacacccagcaaacctcccagacccgcaataccaagcacccacgagtatttgaagtccgaccagtaccccatgatgaccaacgccggaatagtgaagatcaccccagcagcaaccgacgaaccagccgaggcgccggtctggacaatattgttttccaagatggaactgccacccaatacacgcagcacccccattgataccaccgccgccgggattgctgtcgcaatagtcaaaccggcaaacaaccccagatacgcgttagccgcagacagcacaaccgccaacacaaccgcgagcaccacagcacggaaggtaagttgacggggagaaatatcgttattcatccagaacccacgtaattcgcaaaaaaccgagccacgctagcgcttcagccccagcaagtccagccacacgctcatcttggaaaacatccaacacaacgatctgactcaaaaatttttttgaatcacagcacgatgcggcaactccatatccggacctgaccggcagagacaactcccctcagacaaacaacaaccacaccaacaccacgttgaaatcaatggtgcagcacacgcgacaacagccgacagccgtatcccagcccagacacatcgacgttgctgtaatacgatgctgcggcatccagtcgtcagcaacaatgacaccgcaaccagacacaacacgttcaccgacacaacacgccattgcctatatatctatggatcacgtgcaaccagacaatgagtaatacagacaccccataccaacgataaaacagccatcacaaatgaataaacgaaggacaccccccaatattccagccgctgaaaaacctgcgggcaaagcctatcaagccacagcgcttggcatacagcacacgctgcacagcagccctccccaccatatagccccatttaaagaccactctacccaatgacaataccaaaggtcattaaaaagcaacgctgcacaaacttcaaaacaacacgcattcctcaaggtcaatccgagatattgtcagcatcacatgaagaactctttttaaccgagttcatatcgctgactgaagtagatccatgaccattcacaatttcgacctactggtggtcggtggcggtatcaacggcaccggcattgcccgtgatgccgccggacgtcacctctcagtgtgtctgtgcgaacaacacgacctggcctcccacacctccagcgccagcaccaaactgattcacggcgggctgcgctacttggaatattacgaatttgcgttagtcagcaaagcattggccgaacgcgaaatcttgctacgccaagcaccgcacatcgtcagaccactgcattttgtcctcccacaccaaccccatctgcgccccacctggatgatccgcgcgggcctgctgctgtacgaccaccttggctttagccgacgcaccctgcctcgctcacgtcgcttgaacttggccaaacatcccactgggcaaccactcaaacaggagctgcacaccggcttcatgtattgcgacgcccaggtccaagacgcacggctagtcgtgctgaatgcaatggatgcagcacaacgtggcgcacgtatcctcacccgcacccgctgcgtgagaacgcgccgtgacggcgcacattggctgactgaactcgaagacgctcaaggaagacacgaacaaattcgtacacgggccatcgtcaacgccaccggcccctgggccgtcacgtttctggatcacatcgctcaacagccacatcagcacacactgcgtctggtgaaaggcagccacattgtggtaccccgtctgtttgaacatgagcatgcctatatcttccaacaaccagacagacgcatcgtctttgccattccttacgaacaacatttcacactgattggcactaccgacgtcgactacgtagctgatcccgcgaatccacacattgacgctgccgaaaccatgtacctgtgcaatgcagtcaatgcctatttcagacaacaaatcacaccggaagacgtcctctggagctacagcggagtccgtcccctactgaacgatggacacaacaatgcatcgaaagtcactcgtgactaccaattagaaatacttggaaacagcgcaccattactcaacgtgtttggtggcaaactcaccacctatcgcaagctttccgaagaagcagtgaaccagctatgcgtagcattggaccatccctaccgtgcctggactgccaatgggccacccctgcctggcggcgaacaccacgacatcgcagcgctacaaaacacactgcgccaacaccgcccatggttacccactgccactgcgcaacgcctgatacacaactacggcacctgtgccgaaacactgctcggcagtgccaccaacctacacaccctgggaattcactttggcgccgacctgtatcaagccgaagtggactacctgcgcacccacgaatgggcatgcagtgccgaggatatcctctggcgccgcagcaaactcggcctgcatttagatgcgcatggcacacagcgcctggaagaccatctacgctcctgctcacgcatccccgatcacgcggacacaacaacacaatgatcctgccagctccaaaacatcaattgcactgcccctgaggctaagacgtttcagccaccacggaatggagatgaatgcactcaatcccccctgccccctgaaggaacaccgcaatgaaccaaaagatgtttggcgaattaatttccgaagcagtcgcaatgttcatcatcatcgcattgggcgaatctgcggccgcaatgtacatcctttacgaccccagtccttatcaaaacgcctactggggcctgtgtatctgctggggattggcggtgacaatcgccatctacgtcaccgcttcggtttccggaacccacgctaatccagccgtcaccctggcactggcgctctaccgcggcttcccttggaaaaaagtactgccgtactgggcagcgcaaatcatcggcgctttcatcggtgcaatgattgtgtaccagctctatagccccgtcatcgactactacaaccacattcaccaactcacccgcgacgctggcggagccgccggcgtgtttttcacttccacagggatggcaatcacccccatacacgcactcggtgatgaaatcatcctgaccgcattcctggtcttcggcattttcgcaatcaccgaacgcttcaacgaagcagcacccaccgccaacagcggcgcactggtcatcggattcctcgtagcaaccatcggtgcctgcatgggctacctagaaggatgggccatcaacccagcacgcgatctcggcccacgtctattcgcctttctggcgggctggggtgaatcggcattccccgggaaagatcactactggtggattccgatcctcggccccctgatcggcggcgtgatgggtgcaaccgcattccagtgcctgatctatccattcctaccggcacgggtacaggccaaacaacaagccgcgatactgctgaacaggcaacatccctgaatcattgcgctgcaccaagaccacgcaccctgtccgtatcgaaaacactgcactgatgaaaaaaaaatacatactggccattgaccaaggcaccaccagctcccgggccattctgtttgaccaaaaaggccacatcgccgggatggcacagcgggaattcacccagatatttccccaacctggctgggtcgaacacaacccgcgcgacatcatgaccagtgtgtacaccacgatcaccgaactgctcaacaacacccagattgacgtgcgcgccatcgccggaatcggtattaccaaccaacgcgaaacaaccgtcatctgggatcgtcagaccggccaaccgatctacaacgcaatcgtttggcaatcacgccaaaccaaggacatctgcgaccaactcacgaccgccggataccaagatctggttcacgccaaaaccggactcctgatcgacgcctatttttcaggcaccaaggtgaaatggattctagaccatgtcgaaaacgcacatacacaagcaacacgcggagaattggcattcggcaccatcgacacctggatcatctggaacctaaccggcggccaagtccatgtcaccgattacagcaacgcctcacgcaccctgctgtacgacatccacgccctgcgttgggatccagacctgctgacaatgctcgacataccagcggcgatcctgccggacgtccgttcatccagcgacatttacggcctcacccaaaccccgtatttccacggagaacagataccgattgccggaatcgccggtgatcagcaagccgcactcttcggccaagcctgtttcgaacctggcatggccaaaaacacctacggcaccggctgtttcatgctgatgcacaccggcaaaaaagccgtggaatccaaaaatggactactcactacgatcgcttggggcctgaatggagaaatcgagtacgcactagaaggctcgatcttcgtcgctggctctgtggtgcaatggctgcgcgatggattacgcatgttcggcaaagccagcgattcacaagcctacgccgaccgtgtcagcgacaacggcggcgtgtacgttgtaccggccttcgttggcctgggtgcgccctactggcgcagcgatgtccgtggcgcagtgttcggactgacacgcagcaccaccaaggaacacttcatccgtgccgcactagaatcaatggcctaccaaacccgcgacgtcctgagcgcaatgcaggcagatgcaggcatggaactcaaagagctacgcactgacggcgcggcaatcaccaatgacttcatggcccaattccagagcgatatcctcgccgtgccggtgctgcgctcggagatcgccgaaaccacagcactcggtgccgcctacctggctggacttgcaaccggattttggtccagccgcgaagagattacgcaacactgggccatcaatctctgcttcaagccgcagatggacaagcaacaacgcgagcacctatacgcaggctggaaacaggccgtcgcagccaccttaggcttccgtgtggcctgaacacggcagcgacatcaccaacacgcatcccttttctcagaccaccctgcaccagcgcatcacatccacagcgacatacaacacccgagacacaccaggcccggacaatcacatcaccgcaacataaacatcacgtccataaccaagcgcggccaagcaggaaacacagtaccccaagataagcgctccccggacggagcatcgacaacgcattcaaatcgtcgtagcagccaagcccccatcaacaggcaaattgacaccgttgatccagcgggccgcatcacaggccaggaagatcaccgcctcagcaacctcatccgcataagaaggccgcttcatcttgctcgcatcagcctgcacccgatccggacccaacatgctgacaaagtcacccaaaatcggagtaaagaccggcccaggcgccacactattcacccgcaccccatgctcagcaaaccaatcacgcgaccgcagcatggtccagacaatcagtgcctccttaaagtactgatagcaggtggaggccgacaccggatgcgccgccaaccaatccagccccgcagcgaaatccggcgtggcagctaattgtttgtgcaactccaagcgttgcggccattcggcacccaaaagcgaagtcatgttgatgacattgcctcccggcgtgaggcgcggcagcaaggcttgagtcaaatgacgcagtcccaagtaattgaccttggcaacgagatcagccgcgacagtacccggcacaccggcaatattagccaacacatcaatacgttcgggcaactgcgcgattaacgcatcaatggaggcaggatcaccaagatcagcatggaaaaatccatgcaacgtcatagtgactggtcgacaatcgataccgatcaccgtggcaccgtgaaaacgcgccaaccgtgctacctccgaaccaataccagacgccacgccagtaatgagcatcgttttgttgtgcaaattcatgtatcaacaactccacctaaaaatcacagtgtcagcgagcatacgtggatgtgaagattttattagagataacactctcacttcgtaaccattccaaaaaccgctcctactaatgacgataacggcgcttaccctaagatatagatatggtctcatttttgagaaactcgcatcattcctgctgattcccacttccgcagcctgcatgtggacttaggtacctccctttcacgccctaagcaacaccaccatcattcaccaaagcacgcttacccctgtactccaccccactccagaaggtgaccacgatgttcgacatccccggcctgagcacaggtgatttccatggtttcccctcactcctgatacagaccccgttctcacatgcggcgatcagtctgtttggcgggcagttgctttccttcgtaccaagcggtggagaagaggtcatatggctctcccccctggtccaaccaccacccaccgcaatccgcggtggtatccccatctgttggccttactttggccgccaagggcaacgcgacaccatgcctgcgcatgggttcgtgcgtactgtgccatggcaacaagtggagagctgccaagaaaacgatggaagtctgtttctcgtcctggcgccgccaccgctcaaacacctggggttgcatctgcggatgacactgcgtatcggccgcaccctggaacaagagttagccaccgagaacatcagccacgctccgatcagcttcacccaagcgctgcacaactatttcagagtcagcaacgcactacaggtcacggttcaaggactggatggagtggaatatctggacaaattcgagggctatacccaacgccaccgccaacagggccattggaccttgcaagatccacgtgatcccggccgtgcggatcgtatctacgtcgacaccagcggccattatgtgctggtcgatccattattttcccgacgcatcgtgctgacgacggaaggcagccacagcctggtggtatggaatccaggtcacgccggtgcaagcaacatgattgatgtcgccgacggctggcgcgactatctctgcctggaaccagccaatgcaggaccagatgaaatcgaactgctccccggagcacgccatgtgctgcgccagagcatcgccattgcaccactgtagcgcctgcgatagcaccccaacagcatcctgccctctcatcggcacatcaccacaatgagtcaatcgctgccccaaaaccattccagagccggtgtcgccgcggaaacgaatctcaagaccgacatagccacgccacaattgaagtacaccgatacttgacctggacatgccagggacctacgctgcacacgttgcggctttcatcgctatatctggatgaagcgatgaaattaaatgaaagaccggcgaaggatgcttgcatcccatgccgaatctgcaccgcaacggtgaatggaaacgacccccgtcattcacaccaggcaccaccgcgtccctggaacatggcggacagtaggctttccgtgtactcgcacggcctgtccatccatccgaagacccatctggaccggaggagtacatcatcctttgttccagcatggcgctccgcgggaagtaacccgacccacattgagcagacatgcatccgcattctgtccactccaaccggtccgccagcggagcacaaggccaataccctggcatcgacaacaagcaggatgcacctttatttcgctcttcatcgcccttacaagtactgagaacacccactatgacaatcgtgaccaacctgagcttcccgcgcatcggcgcacgacgcgaactcaagcgcgccctggaaagccactggcgtggcgagaccgatgccacacaactccaacacactgcacgcgaactgcgcgcacggcactggcaactacaacgtgatacgggcgtggacctgccacccagcaacgacttcagcctctatgaccacgtcctagataccgcattcctgttcgatgccattccacagcgctaccgcgccctggcagatgctgatcctctggccggttacttcgcgatggcgcgtggccgccaagctgacggcattgatctgcatgctctggagatgaccaaatggttcgataccaattaccactacctcgtcccagaattgcaccgtgaccaacacttcgcgctacgcggtaacaaacccatcgccgagtttgaagaagcactggcactaggcatcactacccgaccggtactcctcggaccagtcagctttctcctgctgtctaaaacagtggatggcagcaaccggctcgacctactggaacgtttactgccggtctacacccaattgctgcgccaattgcaggcaagcggtgccgaatgggtgcaaattgatgagccaacactcgtgctggacctggatgcacaaacacagcaagccttccgtaaagcctacgccgcactcaatcaaggaccacgcccaaaattgttgctgaccagctactttggtccgctcggcgacaacctcgaactggccttgcaactccctgccgatggcttacacatcgacttagtgcgtggcaccgaacaattggatgcggtcctcaacaccttgcccgcgggacgggtactctccgccgggctggtgaatggacgcaatatctggcgtaccgcactggacaacgcactgacactggcgcgctacgcgcaaggccgcattggcaaggatcacgtatggttggcgccgtcatgctcactcctgcacgtccctgtggacctggaacaagaaaaaaacctggacgccgatgtacgcaattggctcgcatttgccaagcaaaaacttagcgaactacgcgtactggctgacgcactggacaacaagccagaagcagaaacagcactgacccaaacacgccaagcattggaggcacggcgccaatcacccaaagtccaccgccccgaagtggcacagcgcctggccgcactcacaccggacaccacccagcgcaacacggcctacccgcaacgcagccaggcacaacaacaaacactcaacctacccgcttacccaaccaccaccattggctccttcccacagaccctggaagtccgtgaggcccgcgcgcagttcaaatccggtaagttgtccgaaagcgactatgagacgtttttgaaagcggaaaccgaacgttgcatacgtacccaggaagagatcgggttggacgtcttggtccatggcgaattcgagcgtaacgacatggtcgaatacttcggggagcaattggatggcttcatcttcaccaagctcggttgggtacagagttacggatcacgctgcgtcaaaccacccatcatttatggcgatgtagtgcgtccagcaccgatgaccgtcacctggtcggcttacgcacaatcactcaccgacaaaccaatgaaagggatgctcaccggtccggtgacaatgctgcaatggtcgtttgtacgcgatgatcaggaacgcgcgcagacatgccggcagatcgcactggcgcttcgcgacgaagtccaggatttagaaaaagccggaatcaaggtgattcaaatcgacgaaccagccatccgcgaagggctaccgctgcgccgtggtgaatgggcggactatctgaactgggctgtggagagcttccgcattgcctcttcaaacgtccgcgacactacacagattcatacccacatgtgctactcggaattcaacgacatcattgaagccgtggctgcattggatgcagacgtgatctcgattgaaacatcccgttcacgtatggaattactggatgccttcgtgaaattccgctatccaaacgccatcggcccaggggtgtacgatattcactccccgcgtgtcccacaggaagaggaaatggtgctgctattgaaaaaagcacgcgcagtacttcccccggaacaattgtgggtcaacccggattgcggcctgaagacgcgcggctggaaagaaacacgtgctgcattgcaaacaatggtgcatgccgcgcagcggctacgtgccgaataagcgcagaccatccgtatacaatcgccggggcgttcaaccgccccagctcgtactggagcaccctgtatgacctcccccattcctactcgccaacctctacaacttccacaaggccagcgcctgctattacattcgtgctgtgctccctgctcaggcgaactcatggaagcctttgtggagtccggcatcgactacaccattttcttttataaccccaacattcacccactcaaagaatacgaactgcgcaaacaggaaaatatccgttttgcggagaaaagcggcgtgccattcattgatgccgattacgacactgatgcttggttcgcccgcgccaagggcatggagaacgaaccagaacgcggcatccgctgcaccatgtgttttgatatgcgctttgaacgcaccgcgctgtacgcacacgaacacggcttccctgtcatcaccagttctttagggatctcccgttggaagaacatggagcaaattaacgactgcggccaccgtgccgctgcaccgtaccccggattggtctactgggattacaactggcgcaaaaacggcggcagccaacgcatgatcgaaatcagcaagcgggagcacttctaccaacaggagtattgcggctgcgtctactcactgcgcgacaccaaccaacatcgccgcacacagggccgggaacgcattaaactcggcgcgctgtactacggcgacacccctgaatctgcaaacgcaaacagtacatcaggtgtcaccccaacggagacaacggattaaactgcttcacctgttatctcaatggagcacctcatgcaccctgaaaacgtcgcattgatcgtcgtcgacctacagcctgatttcatgccaggcggcgcactgccatgcgaggaaggtgcatccattgtccccggaatcgccgcactcttggatgcgcgccagtactctacgatcgttgcaacacaagattggcacccggctgaccacgtttcgtttaccgcacagcagccctttgagcaaatcaccctgcatgaccaaccctagaccctatggcccgatcactgcatccagggcagtgccacagcggcgcttgatagccgtgttgattggcgcgcggctgatctgattttgcgcaaaggcacccgccgccacaccgactcttaatagagcgttccgcgaaaaccacggtcccaacggcgaccgcccagccactgggctggctggctggttgcgtgttgcgtgagcgcggtattgaagaagtccacgtctgcgggctggcccgtgactactgtgttctgtggactgcgcaggatgccctctcggcaggattcaaagtccgttttccgtgatcgctgacacgtcccgtcacccctgagggtgataccccaacccgtaaagcgcttgaaaaaccctagggatcatcattgatcacggctaaagatcaatcctcgcaacccacattgcaccaccgccaaggatgtcacggaatcgactcttcaccactgaagacaatcagcggcgcaagcgttgtgtcgcccaaaccgccaagcgttcacgtccaattttggcgttatgacggatatccactgggaacccgggatgtcttagaacatcaacaataccaacagtatgtataaaagcccgtgccgtggcacgcaagcgctgttctaacgcagccacatccacacccggcagcgcctcgtagcacaatacggggcgctgcgcgccaagcgcaccaatacccaccaatgcagtgcgacgcaccccatcaataacattgaaaacaggctcgacctgctcggtatacaacggtccctgtactgtctccacacgatgggtcttgcgcccacagaaccacaaacggcgctgcgcatcaaagtaacccagatctcccatgcgatgcacgatacgctcactgccatcagccaaacgctcgcggattttagccaggcgcgttgctgctgtacgattgtagcaaacatccgtggcactgggaccaacgacagtcatttcaccaatctcccccagacccacttcacgcaccccgccccactcttcaatcccctcatcatcaatcgcgatgatacgtaccagattgggtgcgatcacatgaccaacgcacgtccctgcaccacgctccgtcgcagcacgcgtcgtttctaattcacgactctcaatcaccgcaaccggtaaacattcagtcgctccatacggtgtcaaaaactgcgcctcatccggcaatagcgcgcgtatctgtgccactacctgcggaggcactggggcacctgctgaagtcacgcaacgcagcgttggcaatggtttgccgtactcagccaagacccgtagcaatgccggtgaaccgaataaatgactcaccccgaaacgcgcgatagcatcatgcagcttgcgtggatcagccctggctgggcacctgggatccatatcgggaatgatgctggttaaaccaagtgctggattaaataacgcaaacgggggaaaggtcggcaaatctacccctccgggcacaatgctaagcgtttcccgcaacaacgcgatctgaccgacaaagtgccggtgacgatacaccactcctttaggcacgcctgtcgagccgctggtgaacaaaatcgcggccacctcgtcggcagtcgtatcggccagttgcgcactggcacctgtgccagcacgctccaggtgcgccagcgtggtaccacaccatgcccaacggccgacactgacaacgcgggtgacagaaggcgcccaacgcaataaacgccgcgccaattgggccagaaaaacaccgatgaatgcctgaggttcggcctcgctcaagcattgtttcaaggctagtcgatcaatgcccggatccacgagtaccggtacggcacccaccttgaacagggcaaacatcagcaggaaaaattccggtgagggccgcaccatcaccaccgtacgcacaccgcgaccgatgccataagcgctgaaaccagccgcaatcgcatcactgcgcctatctaattcacggtagctgagggttaaatcataagccgccatcccgccagaaccgggacgccccggacaacggatcgcaatctgctcggggcgttcgcgtgccaaacgcggcagcacagcagcgatgttacaaggctctttcatgtgttgaattccaccccctgaatggcagcgtccattccagccgatcacattccaagaacgcctgggttatttgatactcaccgcctacctttccccctgtctgcctctaccatcacagcaatcacgttgtgatcatgaccacgaagaacctgttatcacccacgcttgaacaatgacgaatcagtcatcatagaaactgcgctcacgcgtagatgcactggcatctgcttgatctgttgattgaccgaatctgttgatgttgaaagtggaacaagaactgacctccaaccccgttacttccaacctcgatgtttgatgtccaaatacaggctgtataacgctgtgaaggctggcaacacgttctgtaatacgcctaccgaatcctgcttggccgagaacataaagtaactcagtgtcatcaaacttccgagcacactcatgtaccaaaacagccgtggaatcactggcctaccggcatgcttggaagctaaaaattggaccacccaacgtccaccgaacagcaacgcaccgctataaccaatcagtttccaataggtaatatgaagtccggtccaatccagccactgcaactgtgcgttcaatccattggctccagatctcaatactcacgcgcgtcgatacacatgctacgcgctatcaaccatgccacaccatataagtcacggatgccaactaaagcacgattgagattgttgtacttggacactccagaaacacgagaacgatgattcaccggcacattcgccgttttccaaccagcgcgctgcatcagcactggcaaaaaacgatgcatatgatcgaagtgcgggagttccaagaacgctgcacgctcgaacagtttgataccgcaagcagtatcaggggtgtcatcgcgcagcacgcgtgccctgatcgtattcgcccatttgctcgcccagcgctttgaaactgtatcttgacgatacacacgccagccgttgaatagtttcaccgctggtgccgctgcttcacgtgcagccaacagtttgaggatatcggacggatcattctggccgtcaccatccagagtgaccacccaaggcgcacgcgcggctttgacaccattgcgtatccccgtactttgtcccgctcgaaccgcatggtgaaacacgcgtagttccggaatggagagcttcaaccctcgcaacacagagagcgtgtcgtctttcgaattgtcatcaacataaacaatttcgaacaccctcaccccacgcaacacactcacgatctctacaaccagcggggccacattatcacgctcattgaacacaggaacgacaactgaaagctgcaaatcagtcatggggcatccatcgcgacaactattacgatcaaaaagcattacgttgcggcacgcacatcaaagtagtgacggcaccactccaccacttgcggcataccgatctcaatggatgtgactggttcaaatccaaacgcagcgcgtgccgctgcaatatctgccattgtggccatcatgtcacccagttgcattggtttgtaatgcttatcggcaggacggccagcagcctgctcaatcacattgatgaaatgctcaagcggcacgggggtatggttacctaagttgaataagcgatgcggcaccgcctgttcacccggagcatcaagcgcaccaatgacaccagccacaatatcattgataaaggtgaagtcacgctccatgcggccatggttgaatacttcaataggccgcccttccagtacagcgcggctaaagatcagcggcgccatgtccggccgcccccagggaccgtagacagtaaaaaaacgcaggccagtcgcacgcaatccatagagctgagcgtagctataagccatcacttcgttagcaaccttcgttgccccatacagagagcgtggctggtccacgcgctgctgctccgagaacggcggagtcgctgagtccccatacactgaactgctcgaagcgtacaccaggtgctgcacacggcaatgacgacacagctccaatacattgagaaaaccgacaagattgctatctacgtaggcatgtgggttttcaatggagtagcgtacccccgcctgcgccgccagatgcaccacctgatcaggctggacctcgttaaaaagagccgcgcatctctcacggtcagtcaagtcaagcgttcgaatgtgaacatccggacacagcgctgtcacgcggtcgcgcttcagttgcggatcgtagtaggcattgtagttatctaacccaaccacggtatcgttgcgcgcggccagtgcgcgacacacatgagcgccgatgaagccggccgcacctgtgactagcaccgtcatcgggagcctccacagaaaccacagacccgcacatccatacaaccagcggcgatacatgcgcccatcctattcataaggatggcagggtcagctacataccattgcacttgacagcaaacagccagcattaccgtgctccccctgacaggcggcaatacacaatcaatagaaaaggatcgattacacatctttatgctagccccactccaaccaccagagggcacggcgcatggtggctataggcattgtcatcatacggatacaccacaatcaggtagcgttcctggacgcagtccagataacaagcactgatgatggttcttcatcatcattcgtagacatggcaacaacagtggggaagccatcaagatacttaatcagccacacgagcacgcaatctctccaaaacaccatcaagaacatccaagtcggtgtagtggatcaccaatttacctttaccagcacggccatgattgatcgccactttggtacccaaatgctcagacaactccgtttccaaggaggcgatgtcgggttgcgcaggagcactcgcgggcgacttggacttcttgtcacggatgtctggcacttttccagcagcaaattgctgagcacggtgctcgacctcccggacagaccacccttggtcagccgcttccttggcgagtttgtccgccagctcgggagccagagtcaacaacgcacgggcgtgccccatttccaagcgacgtgactgcagcagcgtacggatccccaacggaagttcaagtaaacgtaaaagattagacaccgccgcacgtgagcgaccaacagcctcagcggcctcggcatgcgttaacgaaaactcatcaatcagtcgctgtagcgcttgcgcttcctcaagtggattaagatcctcacgctggatgttttcaatcagcgccatcgcaacaacggtacggtcatctaactcacgaacgagcaccggcacttccgtcagcccagccaattgcgaggcccgccaacggcgctccccagcaacaatctcgaacatatccacatccaactcgcgcacgatgattggctgaatcaccccctgtgccttgatcgaatcagcaagctctgccagcttgggttcactcatctctcgccgcggctgatacttactaggttgtaattgcgtgatctgcagggtacgcagtacttcgccaggtaactgcccctcggcaaccgttggtgggacagaagatccacccttagacccaagcaaggcttcaagaccacgacccaggccgcgcttcttgaggggagggctgggtttattcattaattaatctccacaacgttggcttttttgcggtttttttgacggagaatcacttcattagccaaacccaaataagccacgctaccacgcgaggcgccgtcataaccaacgatgctcttaccgtaacttggagcttcagccaaacgcacattacgcggcacaatcgtccggaacactttgtcaccgaagtgctctgttaactccgtcgacactgcattggccagattattgcggatatcaaacattgtacgcagtacaccctcaatctccagtcgcggattcagattgacacgcagcgcctcgatcgtttcaagcaacgcactcaacccctccagcgcgtaatactcgcactgcatcggcacaatcaccgaatccgctgcggtgagggcattcacggtcagcagcgacagcgccggcggacagtcaatcaagatgaaatcgtactcatggcgaatcggtgacagcgcacgcttcaatcgctgctcgcgctcgctttgctccattaactggatggccgctgcagtcaaatcaatgttgcctggcagcaagtcgaaaccttccggtgccctggcccgactctcagcaacactcctctcacccaacagaacctcacaggtagacgagatcaacccgttcttatccacaccgctgcccatcgtcgcattgccctgcgaatcaagatccaccaacaggactcgctcggatgcacgcaccaagcctgccgccagattaaccgctgtagtggtcttaccgacaccacctttttgattggcaatggcgatgatcctggccatagaaggagttttgatgaaaggggtcatcggagcattatgcggtctgtgaggtcaatcaggaaaatcctgataccgcttttaccagacaacaagcccatttctgctttagggaaagaatgctccaaatgtcaggtccagtgagcaccagacatcgcctaacctgaaacacatttatgtaccaaagaacatggccagaaaagagcgacgctctgcaataaaaaatagatgcatttatcacaaagaagcgccacgccgtgtaggaataaggatagaaacgtgagcatagccgcccatcacatcacttccattccatctcgcccttggccaccttggcactgagttcgagcgatccctctccaccaagtccgggataacgtcgcttcatcgccgcgatcaacgcagccgaatccttggccttggcggtttcctcgtcaaaggcacgaatataatcggcagtaaacgtcaccgagcgcacgtccagcgacgcgccaggtaaaaaatgtcctggaaccacaaccttcggatccattgatttgatccgatccagcacagccagccactctatgtgggactgtggggtctgtgtgtcagccatccatacatgctgagcccccatcaccgagataccgccagcaactgttctgcttgagggaatccacacgaaagtacggtcaggcgtcggaccatccataccaataatcctcaattcctgaccttccagtaccagctggtctccttgcattggttctggaatcaagatttgtttcggtgcatcctgtcccagctgcggcgcccagagcttcagtttcgcatctttactggcctggatatgcgcgatagtttgcggagtagcgagcaccttcgcctcagggaaggcagcgtgcacactatccaggccaaagtaataatcagggtcaccatgactgatatagatcgccttcagacgcttgccagatgcttttattttctctacaagctgacgcgcatcagccgcagaaaactgcgtatcaatcaaaatagcatccgcagtccctgtcaccaatacagaggagactgcaaacatcgaacgctcgcccaggttaaacacttcaacattcaaaggaatctttttggcaccatcttgttccgacccttgctgggacgactggggcggttcagcagaacgatctgccaagttgcatccagctaatgtcaccagggccatcagcgtacacactaaacacgcatatcgaattttatttaatgcttccatttcaagctcccctacttttcaatttttttgaaataaaacaaaaatgcacgctctttattgatgatgattcaatactttcgtcctgattaacgaaatcatgagcgtgtgctgttgtcactatatcattgcacagttggcatatttttccgtccagatgctgtttccgtgcttacaccagggtgcaaacaggcaggcgccactttgctgaccttacgagtaagggcaacgctttattgcagtacacatatacccaataaccagtctttattccggtcactgacaccagaacgcatcaccatcggattgcgtccaatgtttgtcttatatcgttgtatgacctgatcttgttttcaggccagggatgatgctgagagacgattgacaatcaaacaaatgaataaaaccacatctgatatcaaacataccaggcagaaaaataacttgcagggagtttaataaagcagcccactcatggaatacaagaagcgccaatggtatttcatagaacggataaacgacagccgatgctgtttggctccatgacatcagtatgtacttcaatgtcatcatcagatgttgatgaagttttacgttaatctctcatcattgagccatgctgctattgacagcttcaacagacagacagtcattaccgtttctcatcaacatcatgtcgttgcaggtttgctggcaattcaatagcgctcattgaacagggagcgatactctgctgcatcgttacagtgtaccgtggcagatcactgacagatcacagcacctttgtgacattgccgccacttagaactcaaccaatccgactcaaaccatccatataaggacgcagcacctccggcaccgtaatcgaaccatcagcattctgatagttctccatcaccgcaatcatcgcacggccaacagcgacaccagaaccattgagtgtgtgtaccaattccggcttgccggtgacagaattgcgccaacgggcctgcatgcgtctggcttggaaatcaccgcagttggaacacgatgaaatctcgcgatacattccctgcgacggcaaccaaacttccaagtcgtaggttttggtcgcggcaaatcccatatcaccggtacacagtaggatcttgcggtagggcagtcccagcatttccaacactgtctctgcacagcgagtcatacgctggtgctcaccttcactctcttgcggcttacatacgctgaccaattcgaccttctcaaactgatgctgacgaatcatgccacgcgtatcacgaccaccgctgcctgcctcggaacggaaacacaatgagtgtgcagccatacgcaacggcaggcgatccgcctcaataatctcgttacgtactaaattagtcagcgaaatttcagaggtcgaaatcaaatagcgccgatgctcaccgagctgagtactgaacatgtcctcttcaaatttcggtagttgaccagtcccatacaagctgtcggcattgacaatgattgggacattgacttcttcgtatccatgctggcgaacatgcaagtcaagcatgcactgcgccagtgcgcgatgcagtcgtgcaatggggccacgcaatacagtaaaacgcgcaccggatagcttggcagcactctcggcatctaaccaaccatgacacgcacccaattcaacatgatccttgatggaaaaatcaaacgtacgtggcactccccaacgggcctgctctacgttgtcacgttcatcggcacccagcggcacatcttgctgtggcaaattgggaatacccaaggccactttctctaattcagtacggatctcctccaacgctatctccgaggcttttaaatcatcactaaaagcggcaacctcagccattaacgaagacacatcttcacccttgctcctggcttggccaatcgccttagatttactgttacgcagggattgcaactcttgggtatgcacctggatacgtttacgttcgctttccaatgcttcaagggctgcaacatcaagagtgaaaccgcgtacagtcgacaagcattcagcgagtttcgcaagctgttgacggagtagagtcggatcgagcatagaagcagcacggtgcaatggatcgggtgatgattatgacccgttaaggggcatcaatgcctctggcgtacattcatctgcgctgtgaaataatcggcagattcgtccaggcctatgccccatgtacgaccgccgtatttattcctcccctcccaccctccccgcgcatacattcaaaattaccggcatcgcatttggtatcggtattctcttatttggttttttttggatgacaggacgcaggcaaggcactgcgaccgatactcgggtagcaccggtggccgaaagtacgcagacgctgcctccgttaccagcaccgttgccagcaaaaggcaatgttgctgccaatatgcccaaggcaccatcagatccactcccagagaacgacctggacacaaacaacgcagcaatcaacgacacgcttcccgaacccatcccgtcagctcccaacggcacagcaccacctaatatgtcggcgcaagcacagatgccgacggcaacagcatcaccccagaatgcagcaacaacggctgccagcagccaacccactcctatccctgggaaaatgccctcacctgactatccagccgaagcggcggcacgtggcgatcacggtaccgtcacggtgcgaatactggtggatgccgaaggtgctcctagtggtgtggaaatggctaaaagtagcggctcgcgtgacctggataatgctgcactgcaaacggtacgcaactggcgcttcaaaccagcgcgcaacagcaacgatcagccggtaccgggaagcattgaaatcccattcgagttcaatgtcgggcagtaatctcactactttgctcgttaacgccacatggcaaggcatcacctgctgatcctggtcagcaacccagcaggccgcttcttggccacttcggcctggctggcaaagcagggaatgtacaacaatcagcaaccctgtattgatctctgacaacatcgcaaaacgccatattagctattgatttaaaaagatttcccaatcaaggtttccgcaacttacggactgcccccgttggcgctcacttggttggcttcactacttccccaacgcgccgatacacccgctgagtgatttgctgctgagtgtggcctaacagcttgctggcatgctccaacggtagctcactggcagccttggggcggatatcgcggaactgaaaaataagaattctttttgctaaatctacttcgccagattcagaagcggcctttgcagcagcaactcgcgcacgttggaatcggactcgcaagggcttgctgcctagcccaacgcctttcgatgtggagacgagagaaaagccgataaccttacgtttacgtgccttaatacggtcaatcactttccctaactctgtgcgtattccctcactctccaaaagaattcgcaacttcttctttgttttgttttgttgtacctcaagcgagccatctctaatatccgtaaagcgcatcttgaggacatcagcaggccgttggccggttaaataggctaaatccatcgcatctttgagttcttcacacgccttggcatagacagcgttccatacagcagcatcggcgtagaaatcacggggtttttctttgattttgcgaatccctttcacttggttttctttgttggtgtagccccattcacgcgccatagtccacacgctggaaaacacactgagttcccggttagcgagtaccggcgcagtgcgtgcgcgtttgtcgcggtactgtgcaagctgctgcggggtcactgtatggatattcacgtcgccgaatactttacgtagcgtggtcatgcagcttttaatttggtaccgggtcgcacgcgctttagtgggtgccacttcgcgcaaatagcgatcaaatataaagccaagcacttctgtttctacgggggccttgcagcactccaactccgcccattgacgctttgcttcgtttaaatcaccccccaacggaatttcaacgcgccgcccttcggtggtgcgcccgttgtagtaaaacgactcccacacttttccgctttttaatacgcgggtacggcgtagcatcttgggcggcaaatctttgtggcttgattttgggcgcatggtgctgtgccctattcatctagcgcagcaaaattaggaagctttactggacgtataccagcgcctgccatgtgcagcgactcaccggcgacgcgcaaacgtgcataccagcgccccactatcgggcgtccagatgcgttggtcacatagcaccagccttcgctgtctaaccatttacgttggccagcacatatcttgtaaccggttagctcacacacttcattagcggttaaaaattctgattctctcggggccgtttcgtccgattgcgtggtatcaacaaagcggtagttgcaggtgtcgctcattgcctcatggctccttgtggtgtgggcgatttgcatgtttctctacgtttcactgcctctagcagcaagtcctgtacttctcgtttggattcacggcgggccatcaccagctcatccaccgtgttcgccgccacaatgtggtgaatgaagacggggcgatcatgtccggcttgcgcctgacgcgttgggccaatgcgttcgatgatttgttggtagtgctctagattcccgtggactgggcacagtttgtggagtacgccaggcgcgatgtggcagccatgcgagacgtggtgaagcggttgccgtcccacaactacgcgggggcggagctggcgctgtggttcctggaccaaaccatcaatgatcgcggggtcctcatcgatacggacttggtgcaggccgcgattggcgctgtggaacgcgccaagcaaacattagcccagcgtaccgaggcgttgaccggcggcgcggtgcaggccgcgacgcagcgcgatgcactgttgcagcacctgaacaccgcgcacggcgtggcgttgccggacatgcagcaacacacggtcgcgcggtgcgttgacgatccggcactcccagagacggtgcgcgaactgctgtctattcgccgacaagccagcagcaccagcaccgctaagtaccaggcgctactgcactgcaccagccctgacggtcgcctgcgcggcacgctgcaatttaacggggccagtcgcaccgggcgctgggcggggcggctgtttcagccgcacaacctgccacgccccacgctcagccaagaagtgatcgcggtcggcatcgatgccatgaaagccggttgtgtggatttagtctttgacgatgtcatggcgctgaccagcagcgcgctgcgcagttgtctgattgcgccaacacataaaaagctggtcgtggccgatttgtccatcattgaaggccgtgtgttggcgtggctggccggtgaaacccccaagctgcacgcgtttcgtgagtttgatacgtgccaaggggtggatggtacatggcacagcggcgaggccatcacgcacgcggcgcgccgctggccctgcaatggaatgccgagcacgaacctctccgcaaaggggaggacatttacaagcgggcgtatgcccattcgttcgggatcgcgccccaggcggtgaccaaggagcaacgccaaatcggcaaagtgcaggaattggcgttggggtatggcggcggtgtcggggcctttgctgcctttgcagcgctgtaccacattgatttggaggcgatggccgcgcaggccgtcttcccgccgctgctgcttcaggaggcaacggaactgcttgaatggaccaaggcgaaccaccggcccaccttcgacctctccgatcgcgcatggctggcgtgcgatgtgttcaaacgcgcatggcgcaatgcgcatccggccattgcggcgttttggcaggcgttgcagttcgcggtgacggatgcgatccatcaccccgaaacgacgcacacctgctgcgggatcacagtgcagtaccgccgggcatggctgcgtctgcgtctgccgtcggggcgggtgctttactacgccgctcccagagtcgatgagcacggcgcgctgtcctacatgggcacgcatccgatcacgcgaaaatggacgcgcctcactacctacggcggcaagctggtcgagaacatcactcaggcggtgagccgcgacgtgttggccgcctgcatgcctgcgattgaagccgccggatacagcatcgtgctgaccgtgcatgacgaaattattaccgaagccgatgaccacccctgcttcaacgccgcgcacttggccgcactcatggcgacaccgcccccctgggcagaagggttgcccttagcggcggaaggcttcgacacctaccggtataggaagcaatgatgaacattccccgtgagagaacgatcgaacgctatttagtcgcacaggtcagggccaaaggcggtgaaatccgcaaggtgaaatggggtggccgccacggtgcgccggatcgcatcgccatgctgcctaacgggcgcaccctgtgggtggaactcaaagccccaggtaagcagtgtacaccgcatcaagtccgtgagcatgcgcgtatgcgccgcatggggcagcacgtggtcgtggtcgattccttgaaaggcgtggatgaggtgctggcgtgactcagaaaaacgctttgatgatcagtgcagcaacgcccgccacgagcacgcctagcatccacttgagcaggagcatttcgccttttatctccgcaaagcgcgtatccacctgcgcaaagccttccttcatatcggcttcaaggcgcgctaaggacttgccgtttttagattcagactcagcaaggccttgtaaatttatttcaagcacttccgccaaggcttcggcctcggcttccgcgtgcgccgcaggaacccctgccgttttcaaccggttcgcaaacttaagtgtatcgaacgctacggatgtcacacagccccctgtcttagccccatgtgatggcgagtatagcagtgcgccgtgtatccacctgctgaaaccaattcaaaacaccaccaccaggactactccatgactacacagcaactggctatcaattctctccccattcgtgagcaagacggcttgtactcgctcaacgattttcataaagccagcggcggagccgtgcggcatcgtccttctgagtttttaaggctcgataaaaccaaggcattggtagttgaactcacaaactctccagagtttgtgagttcaataaaaggaggggcaccccaccttttcgtgagaaaagagaaaggtcgcgctggaagcacctttgcttgccgcgaattggcaattgcttacgcctcatggatttctccagcgtttcagctgaaagtcattcgtgtgtttcttgcctctgttgtcgtaccggccacaccacatgtcgctacacctgccaatatcgatcagttacgcagagatatctaccgctcattgcagtatgtgtcatctcgtttaaacatcgcctacgaatttgccagacgtgtgagcgaggatgcggggcgcgatcgcaagcgcgagtacaacggccaagaggatgtgtacaccctggaggcaatcacttacttaattgcagacggaaaaaacggacttaaagaggccgcagggagcgtcctgtcgctgactcccatacacaggcccgcacccacgcccacacaagctgccactaacagcccccacctgctgcgcaggtatgcgacatgaacctacgcccctaccaacacaccatggttgatttcatcctgacacacccacgctgcaatctgtttgtgccaatgggtttggggaagacggtagccacgctgacagcgttagatgtgcttctggtggtggaagacgttgcacctatgttggtcattgctccgctgcgcgttgcggccacgacatggccggatgaagtggccaagttccctcatttgcgccatctgcgggtggccgtggtcgtgggcagtgcggcggcacgtcgccgcgcgttggagcaggacgcggatatctattgcattaattacgacaatctaaaatggctggcggagttttatcaggaccgttggccgttccgtaccgtggtggccgatgagtgctccaagctgaaagggttccggctgcggcaaggcacacggcgcgcccgcgcactggccaagtatgtgcataccaaggtggagcgctacattgggttgaccggcacgcccgcgccgaatgggctacaggacctgtgggcgctgatgtggatggtggatcggggggcacggctggggacgcattttaaagcgtttatcgatcgctggttccgtgcggtgcagatcggcagtgatccgcatgcggtgcgccttgtgcccgcgcccaatgcatcgaaagagattcaggacacgatacgcgacctctgtttatcgcttgatccgcatgcgtatttcgatttgcgccagccgattgtcaatacgattcgcgttgtgttgccagcgcatgcgcaacgtctgtacaaggccatggagcaagagatgttcatcgccttggaatgcggtgccgaagtagaagcctttaacgccgccagcaagacaattaaatgcctgcaactggccaatggtgcgctgtataccgatgacacacgccaggcctgggaagtcgtgcacgatgcaaaactagaggcgctgcacgagattatcgaagaggccgccgggatgccggtattggtggcgtatcactttaaaagtgatgtcgcacggttgcagcgtgcttttcctaaagggcgtgtcttggaccaacaccccgacacgctccgcgattggaatgcggggaacattcccgtgttattcgcccatccagccagtgccggtcacggcttaaatctgcaagacggcgggaatattttggcgttcttcgggcactggtgggcgcaggtacgtaacggcgtgttgatgcgcacctgcacagtgtgcggcggcagtggcacggttcctatcagtgagcgtaagcgcgcggcggcgcttggccgtgatgtgtctacgtactgcaaaaagtggcgcggtgtgtacgaatggctattagacacgctacgcgcggcggaacagcgcgcggcggcggagctgaaagcggcgttacgggaagatgccgcgtagtgttggcttgattgtccaatactttttgcctatagtttcccaagagttgcgctatgtttgtttcgctaacgcttcttgagtgccacgcttgcccccttctgttccttaacgcagcgcggggctttttaactcggataaagccatgaaaaccgcctaaaggcggtttttttgtgggtgaagctgttgcgctgtatctgtcttgccgaattgcgtagcgcggagcacgaaatcgattttatcttgttgtttttattcataaaaaatattttgcgtatacttctctacgtagttgtacgcttctttggcaatttcttttttggttttagctaaaaacgcgtccagccatcatctcgcaccaacccataaccctatgatcgttgcgtcatctgctgcgtacaggctgcacgaaggcgacgcactgcggctgctttgcgctatagacagcgcaagcgtggacgtggtgattactgatccgccgtactgttccggtgcaatgcggatgtcggatcgcttccagcccacgaaaaaaaatatatcaacaacggcacgaaacacgttgcccctgattttgattgcgacttccgcgaccatcgcggttttttggcgtggtccagccaatggctttcggagtgtcgccgcgttacgcggcctgggggcgtgcttttagtgtttactgattggcggatgctgccgacgctcaccgatgccgtacagagtgcaggctgggcgtggcagggcattgtggtatgggataaaacgcctgcttgccgtccccagctaggccggttccgtagccaagccgaatttatcgtctgggcgtcctgtggcttgatgaatcccaaagcgcatccggtcacgccggtaggcgttttcccaaccggcacagcgccccgcgaaaagcggcaccaagtcgggaagccgttagcgctgatggagcatctaataaaaattgtgccgcctgcttctacgattcttgatccgtttgcaggcagtggcacaaccggcgttgccgccttgcgtgcgggacatcggtttattgggatggagatgtctcgttttaagtacgtgtgagtcgtgccaagctgcgctgtgcagccgcgtcaatcaactgccagacatgtttgaagtctttcgcgtcaccaaggtatggatccggtatttcgcgttcctctgtgattcctgcccaaggtaaccacaggacgatcttatgcgctgtctcggggggcgctaagcggagcaggtcgcgttgattcgacgcatcggcgcagagtagccactcgaagcgctcaaaatccgcatggtgtacctgacgggcgcgcagtgtggaaatgtcgataccgtggctgtgtgcacaatggattgcacgggcatctggtggctggcctatatgccagtgaccggtgccagcggagtcgactgcgatttcctcgtttttaccgattgcgatgatgtgcttgcgtaatgctgcctcgcccattggggagcgacaaatgttacccaggcaaacgaccaacactctcatacatcctccaatgccttctcggctctggctaagtcttctggggtatcgataccgggcgggaaatgttccggagtgatcctgaccgcgatccgatgtcctgcttccagcacacgcagttgttccaacgattcaatctgctccaaggtccccggttgcatcgtggtgaagcgttgcaggaacccagcgttgcaggcatagagaccgatgtggcgtagccacggacccaatggcgttggttcaggcgttgtggcgaaggtatcccgattccatgggatcggggcacggctgaagtacaacgcttctccatgtgcattgcacaccaatttgacgatgttcgggttgaacaggtcttcgctcttgtcaatggtcgttgcgagcgttgccatgtcggcattgctgtgatgcagcaatgccgctacagcacgaatccccgccgctggtgcgaacggctcatcgccctgtaggttgaccacgcacatctcaggatcccatccggcgatgcgtgcgcactcggctaagcggtcgcttccggataggtgagtgtttgcggtcatcgccacgtggacaccgtccagagaagcaacggcctcagcgatgcgtacatcgtcggttgcaacccatacttcccgtgcgcctgcgctaagtgcccgctcggctaccctgtgaatcagtgggcgaccaccaagcaggcgcagcggttttccaggcagtcgtgatgcggaaaaacgtgcgggaatagcaactacaaaaggcacgatttcgagactcatccagactttcctatgaaatcaagtcaagcgacatcaaaaataaagccgcttttctgtactcatgtggggcacatttatacttcggctgattcatgtggattgaggtgacacgttgtgtttctcacattccctgaaattgcagtggccgcagctgattttattgtatcgggttgtccctggttggtgctgcacgaatgtgtagtaactgcgggcgaggggagtgcgctacggatcgaatatggtgcgaaatgaagctatacattgcttcttggggcagaagatgtctttctctaaagtaatcaagctgggtgtggagatgtgttgtgtgcagcgcggtcttcaatgcgtagattttgtatttttgaccgccgcttggattgttttaaccaaaaaagatgacatcaggtgattagggatgttcgatccagcatcgaacggatcgcactcatgtttgcctgcatgcgctgatcagttcaccgaataggacagttgagtttctatatgcgtcactgctgactgcttgttgtggaatgttgatgctgagtggtgcagaggttcattactgttatatgcgtatggaatgtggttgagtaggccatcatgtggtgccatgcgatgttgtatcgcgggcaggctgcctcttggctgaatcctgcgaatgagccaagatggcggcgtcaccaccgatgagcgcgcttgtgctgcgcccctgcaattgagtaacacatttccccgagtcagccgccacgctgtccaaactggtctgtctccacatccacgcgtgcgtaatgtcattgcggttggttcgggcaagggtggggtaggcaagtcaacgattgcagtcaatctagctgttgcgttgcagcggacgggtgctcgggtgggggttttggatgcagatatttacggtccgagtgtgccggcgatgctgggtttaagtgggcgtccggaaagtccagacaataaattgattgagccactgcgtgcatttggaattgaggcaatgtcgatcgggctgctgattgatgttgataccccgatgatttggcgcggtccaatggccacctccgcgttgactcaattgttcaatgacactttgtggggtgatcttgactatctgttgattgatctgccgccgggcaccggtgatatccaactgaccttatcgcagaagattcctgtggcaggtgctgtcattgtcaccacaccccaggacattgccacgctggatgcgcgtaaagcgctgaaaatgtttgaaaaggtgaatgtcccggtccttggtattgtcgagaatatggcgatgcattgttgccgacaatgtggacatgtcgaacatctgtttggtgaaggaggcgcgcagcagatggcagagcactaccatgtgccattgcttgggtcattgccgttggacattgcaattcgcgagcatggtgatttgggtcagccgattaccgttgccgcacctgaagggagcgttgggcaagcctatgctgctgttgctgcctgtctggcggtggaattggccaagcgtccgcgtgctgcgattccgatgaccacaacattgggttgagtggtgcggcaatatgctgcgttgctgaaaacagcaatgtctgcaagaggcgcactttcttggcgtgttgctgaagtgcgttttacttttttagtcatggcattttcagcggtgcttctgattcactcaggatcgctgcttcgttggcgattgtttggaacgctgcacgcgcggcttccaacgtggcctctatgatgtctggtgaatgcgcactggagataaatcctgcttcatacgctgatggggcaaaaaacacgccgcgttgcagcatcgcgtggaagaagcggttgaagcggtcagtattgcaggcggtcgcttgggcataggtttccacctgttgatcggtaaaaaacagtccgaacatacccccaatctgttgtgtggtcattgcaatgcctgcctggctggctgcttgttgcaaaccggtacacagggctgcggcggcgttgctgagatgcgtatagaaatccggagcctgtattagttccagcatggccaaaccagccgccattgccactggattacccgagagggtgcctgcctgatagattggaccggctggggcaatgtgttgcatcagatcgcggcaaccgccatacgcaccgaccggcatgccgccaccgatgatcttaccgaaggtggtcaggtccggtgtcaccccgtacagcgcttgcgcgccgccaagtgcgacgcgaaagccggtcatgacttcatcaaagatcaacagcactgcgtactgggtgcacagggtgcgtaaatgttgcagatagcctggtcgcggcggaatgcagttggcgttgccgatgacaggttcaacaatgacggccgcgatgtggtgtcccatctcctcaaacagtgccgtggccgcatcgaaatcgttgtaagtcaacgtgattgttagtttgctcagctcggcaggcacccctggtgaacttggcatgccaagggtcagcatgccgctgccacctttgactaggaatgagtcgccgtggccgtggtaacagccttcgaatttcacgatgtgattgcgtccagtggcgccgcgtgccagtcggattgctgacaatgtggcctcagtgccagagttgaccatgcggaccatgtcgcaggagggcacgagccgcgcaatggtttctgccatggtcacctcggcggcacatggggcaccgtaggacaggccgttgctaatcgccacttgcaccgcctcacgcaccgctgggtggttgtgaccgacgatcatcggcccccaggagccgacataatcaatgtagcggtggccgtcgacgtcaaacagatacgggccatcggcacgtgcaacgaagaacggctccccgccaaccgagcggaacgcacggactggcgagttaacgccaccagggatgcgtgtttgcgcctggacaaagagggtatgagagcgggaatgattcatgaggagcggagacctcgcagcacgggtagtgggatgaatgagtggatgcgtacagcatgtctattgtcgcggcagcgacggctctgtcgcattagtgacatgaagttggcaaaagttgcgttggcggttatttaggtcgctagcaggtagaattgttccgcaggcgacaactcctcactttgcaggtgttgatattgcccttttcgtatcatgcggagcagttctatgccggacaggatcgtctgtgcccgtcgaaactatttgaatcccagcatcggtcgactccgaggtttaatacttcggtgatcctgctcaatcaggttgttcaggtacttgctttgcctgatattaattgaattgcttcctgatcgggtttgtcggcattgagtgcggtcaaagctgaggcgttagtaccacttttatccatagtgaccacctcgggttcaccgtgatgacggatggccttatgaaagaaatgaagcgccgcaacggcatcccgccgggcagtcagcagaaaatcaatggtctgctctgctgtatcgacggcacggtacaggtatttccactgacctttgatttttatgtacgtttcatccattcgccagtgacttcccacaggacgtttatgccgacgaaatgccatatccagtaacggcaccaggcgaatgacccagcggtgaagcgtgtaatggtccacggcaataccacgctccgccatcatttcctcgacattgcgcaggatcagggcataagccaggtaccagctgacacactgcgcaataatattggcgggataatgcaggcgacagaaggatttaaggagaaggacacgcagtgacgctgacagaaaaatcgggtcatctggcgtggtgcgccctggtggcgcttgcactgtccagacagaatggcgatgtgttgtcacaggcgcaggaaaacctctttctcacccgctggctggctaccgcgctgaagcaacggcgtttttcgcatgatgttgcccctgatattgagtggcttctcaaacagggacgccagctgagcgtcagcgcgaagctggccagcaagctgaattacctctggtgttcctgcatcggctcgctctctgagcagaacgacttgttcatggtttaggaaactcaatcgaccctttgggggtttcctaaccacgagcagtggcgatgaagaaccttatgaggtaaggcctgttgggtgataatgcgcaaaaaggcaagtttttgggttttacgctggaaccccagaaatttccgtcaacagaatgtttagaagctaactggcgaaagtactgttcgccatttagtgtagcaagtgattttattaaacaaggggttgtaaatgataagttgcatcgatcatattgttatcaccactagggatatcaaagtatgctctgatttttatactcgtatactgggaatggagctgatccagtttggtgataacagaatcgcgttcaagtttggacaacaaaaaataaacgttcacgaatatggtaaagaaatagagcctaaagcgcatcttcctgttcctggttccctggatatctgcctgataagttcttactcaattgatgagataaagaaggttttagaaaaaaacgacattgtgattgtcgatggtccggtatcccggacgggggcgtgtggtgctataacttcactatatctgcgtgatcctgagcttaatcttatagaaatctcgaattatgaaaatcactaaccgctggtgataatatccgccctgttaggggggacgctcagtggaacgaaaacggttctgtcgcattaaggccgcgtcgggtagcatcgcaaaaagcagtatgttacccgaggcggccttattgaacatgtgtatggatttctggatacggtgtctatggttccagtaaacacatgatcaatgatgcggatgcatcatatagggaaactgccgcttatgtgtgtaatgcggtgtaccaatcaaacgtgaatactgtttcttatcgatgtagctatgctgggaacgctgtctgtaagccctggagtggagctatactctgatttgatcaagcgtgtatggccgatgcagtgtcgctgtgttttcaggtggtgaggtgatattcccagtgttgaacgtgcgtctttaatcctccgatttaccttcacgcaaccagcttgctacttgtggtgcgaagtaggtcaatatgccatctgcaccggcacgtttgaatgctattaacgtttccaacacactgctgcgttcttctaaccagccgttggatacagcagccttgatcatggcgtactcgccgctgacttgataggcgtaagtgggcatccggaatgtctcttttacccggcatactacatccaagcaaagcagtccaggtttgacgatcaccatatctgcaccttcttcgatgtccaaggcaatctcacggagtgcttcgtcactgttagcagggtccatctgataggtttttttgtcggctttaccaaggttggtcgtgctgcccactgcatcccgaaacgggttgtagaatgccgatgcgtatttggccgaataagccatgatgctggtatctacgaagtttggatgagtgtctagggctttgcgaatcgcaccgatgcgaccatccatcatgtcagagggtgagatgatgtcggcacctgcttgtgcatgcgagagtgattgttttaccagtgcttctacggtgatgtcgttgagtacgtagccttgtgagttgatgattccgtcttgcccgtgtgtggtgtatggatctagtgcgacatctgtcatgacgccgatctctgggaagcgtgttttaagtgcacgtactgcatgttgtactaagccatctgggttccatgcttcggcggcgtcaaggcttttcaatgccggatcaatgaccgggaataagctgatgagtggaatacctaaagttaatgcgtgttcggcctcatggagcagtgcatccagtgagagccgctctacaccaggcattgatgcgatgggtgtccgcccgggtaggccatgcacgaagaccggccagattaggtcatccacagtcaaggtgtattcgcgtatcagtcgtcgaataaagggatgacggcgcatacgccgtggacggtaatgtggataggccatgattgagttgatgtggatgatggggtggggcgtgacattcagttgttatgtggttgtcacgattgggaaagcaatattttgtgccagtgtttttaagggctgatggttgaatactgataggaacggcggcaagagggatgagagtcaatgtgtattgacctcactctcctgatgttcatggcccggttgcggtcatttggataggtaagtcgattggattaggttgtgcgggacgttaaattaagggccagcttggtgaattgcagaggggacgatcgtatacagaggtctacaatctgcatcaggttaatgagtctgtcatggcgatcattatatgcggctctgtgatggtgcttatgggacgtaatgtcgcggttacatcatccgtttggagttaaccgactctctccgtcatgtcgagggagcaatgattttcattggacgtctctattgagagtgttcggaagtaggttcccgaggtgtgtttggtgcatggtgaagtttgtctgatgcctgatgtcgcggcatataaaatatgtgaggataatcactgtaaggtgatcttttccaggttcagtgacctacgcacatcatttccacgatggaattcgttcaggagtcctatgaccatgtctttgcgttttgtgatcgtcactttctttgccctcgctttggttagttgtgccattacttccaaggtaatgttaggcccggcacgtgagccgattgagccagcattagtaagcatttatccgaatcttcctgccaatgccgtacagatcgcacagcttgaatcgatcagtggttctgaatttggaagtcaatcccagagggacgctttgatagcgcaattcaagcgtgaagcagccaaacttggtgctaatggtctgatattgctgggaggtgcctcccaacgttccgatactagaagctttgctagccgtatcgtcagtgctttgaatattggtattcctgctatgcggaagcaaacggcaggtatcgcgattttcgtaccttctgctactcgtttgcctgatgagggtttggagaagattcaggaccaaccaagacacgagcatatccgcttggagtgggcggaccctttcgatcatgccgagtgagcaatgatcttcatggcgtttccctatgaagacgctttcggcggaaggtcggtcctcacgttatgcttggtgcatggtgacggctgcgtcatgtctaatgcctccacataaaatgagtgatggtaatcacgttaagatagtctttccaggttcagtgacctacgcacatcatttccactacggcattagttttagttcaggagttccatgcccatgtctttgcgttttgtgatcgccactcttttttccctcgttttggttggttgtgccagcacttctaaagtaatgttaagcccggcgcgtacaccgattgatccagcgttagtacgcatttattcgaatgctcctgccaatgctatagagatcgcacagcttgaatcgatcagcggttctggatttggcagtcaagctcaaacggatgctgcgatagcccaactcaagcgtgaggcagccaaacttggtgctaatggcgtggtcttggtgggcgtcggctcgcagcgttccggtggcggcgtgtcgatcggtgctggcagctttgctggcagtatcgccagtggtttgagtgttggtattcctaccatgcgaaagcaagcggcaggtatcgcgattttcgtaccctctgatagtgggccttctagggagagtccagctcgctgaccaaaacaccatagaggagactggattgctcgataatgtaatgcttgtgcaaccactgaaggtgggtcacttggatatgatgtctccgtgtaaatagtcttttcaggtttattgacctgcacttatcaatcagttagttgtaatttttttacgtaacgcattgattttattgcattcgaaaaaccgcaagcggaagcgattttaggggggctttcggttgtttcaggaggccctagcttagtttctggctgatggcttagcctcgttttgatggatatgtcagtagacagcgggccgttggtgcgctggcgcgggaaatccgttgcgaacttcagaactgcgtggcgctcacataaggacaccgttctaaaggtgatccggccacgatggctacgctgcggagaacattcaagggatgcttgcggcaccgtgcatatagtgggattacgggcgtttacgccaaataccggcgtgactactatatggtcgatgttgttagcgctattgatgcctatatgggccagttgcgcgccagtcaataaatcaaatattgaaaagattgcgcaacctattgattttattggagcgggaaacgaggctcgaactcgcgacctcaaccttggcaaggttgcgctctaccaactgagctattcccgcttgggccacaaaatcttacacgcttgacgaatgctgtcaactattaatttttcggttcttgctgatgtgcgttttaatcaccacaggttttccggtacgtagactaggccaggcagcatgcaaatactggaaaccagaccacagtgtcagtaacgcggaaatcaacaatgtccaataaccgacttggaagatcaagtggccaaaccatatttgatggatcgccttcttctcgggtgtcaccgaatagagcagacacagtaccgcaatcatttgagccgtagtcttcactttgccaaggacagctacacgcaccttggcacgatgaccaatttcggccatccactcacgcaatgctgacactgcaatttcacgactgacgatcactgccgcccaaaatgccatcgacggtgtcgggtgaccttgcacaatgagaaataatgcgatggccaccatcaatttgtccgcaactgggtctaaaaacgcacccaataacgaatgttgcgcgtaacgacgtgcgatccatccatcaagccagtcggtaatcgcagcgatcgcaaacactcccgtggcgacaatattgctccattgataaggtagatagaacaccacaatgagcacagggatcatcacgatccgtagcagcgttaaccaagtggggacggtcaatttcatgacaccctcgacgcatttactgcatcactttttgatagtccatgcaggctggcgtaaattttggctgccagcgcagtactgatgccttccaccctggcaatctcggtttggccagcagctttgactcccgccagtccaccaaaatgcttgagaagattggcgcggcggcgtgagccgattccaggaatgtcttctaatttactggtcatccgcgttttttgccgacgtgcgcggtgtccagtgattgcaaatcggtgtgcctcgtcacgcacctgctggatgaactgcaacgcgggtgaagctgctccaggatgcagctcctgtccgtccagcataatcagcgtctcgtgtcctgcacggcgctcttcgcccttggacacgccgaccagcagcacgctttccaccccaacagcgttgagtgccatcttggcttgtgccaactggccagcaccaccgtcaatgaatagcacgtccggtcgttctccctgtttgtcttcttcaaccgcacggcggaagcgcctctcgatggcctgacgcatcgctgcatagtcgtcaccaggggtaatgccagtgatgttgtaacgccgatactgggaacgtaccggaccaacagcatcaaacaccacacaggaggcaaccgtggcctcgcccatcgtgtgactaatgtcgaagcattccacacgcttaatcggctcctccagaccgagcagttgacgtactgcttcactacgtacccgctgggcacgttggctggtgagttcggtggataaggctacttgagcgttacgtacggctaactcgacgtaaccggcacgctcaccacggacgttccagcgtaggctgattttatgtgcgctggaacgactgaatgcggcttccaggagtgtgtgatcggggatttcttggtccagcaggatctccggtggaggtggatactccgcgtagtattgagagacaaaggcactgagtatctcagcggtgcgttcttcaccatttgtcttggggaagaacatacgcgtgccaagattgcggccatcacggaaactgagcagcagcacgcaggcgtgaccggatagagccgcgcaggccagcacatctaaatctgcggcgcgtccgtccacgtattgccgattttgcatgctgcgtaatgaggtgagcaggtcgcgcaagcgcgcggcctgctcgaattccagatgttcactggcaacttgcatcgcttgtatcaactcttctgcaagcagatcgctttttccttcaagaaacagcgtcacacggcgtactgcctcagtgtaattatcatgggtgaccacgttgacgcacggtgcactgcaacgtccaatttgatattgcaggcagggtcgcgaacggttgcggaacacgctgtcttcgcaactgcgtagtttgaatagtttgtgtatgagattcagcatgtcgcgtaccgcagtcacccccggataggggccgaagtagcggcctggaacgatctgtgggccgcgatgcagtgcaatgcgtggccatgcctcacgtgtcagcagtacgtatgggtaactcttgtcgtctcgcagcaagacgttatagcgcggagccagtgatttaatgagctggttctccagcagcagggcttcggcttcgttgcgcgtgatggtgacgtccatgcgtaccacctgggcgagcatggcggtcagccgggtattttttggagtgccattgaaatagctggcaacgcgtttgcgcagcgcccctgctttgccgacgtataacaacgtgtcgtcagcagcgtacatacaatagacgccaggcgccatacttagatgtgcggcgaacctttttccatcaaatgtgattggtgcgttatccgtcatattccaatgatgttgcacacattgcttcgcccttgccgattgacagcaccaaagccgttgaggctaacgcgattcaccgaggaagcgccagccaagtgtgcttgtttggatcttcagctctattgaaccagtacatcctattgtccgtccgacgtttcactgaaacaacagggggacaatgtcaggcagatactgcattgcaatgtcatctaagacaaaaataaagggaagtgtggtccacagacgatagccacgatcccgttgtgcagattggtttggcatcgtgatagtgcgtgttttccccgccgcacccagcaaagcccgcacgcgctggggcaatacagagacgatcagcagtaaccagatcattgccgtggccctccaaggacctgtcaccgaacgcacgggtgcattgcccccttctgccccttaacgcagcgcggggctttttaactcggataaagccatgaaaaccgcctaaaggcggtttttttgtgtccgttttcgcctgtgcggaaatgatttagtaaaattactaaatagttgcggaaatgatcgtagttttcttgcgataatttcattataaaacaatgggttataatggcggcatactgctacatgcgatgacgtctaatcacctattttaggcactaaagccctatgattgttgcgtcatctgctgcgtacaggctgcacgaaggcgacgcactgcggctgctttgcgatatagacagcgcaagcgtggacgcggtgattactgatccgccgtactgttcgggtgcgatgcggatgtcggatcgcttccagcccacgaaaaaaaaatatatcaacaacggcacgaaacacgttgcccctgattttgattgcgacttccgcgaccatcgcggttttttggcgtggtccagtcaatggctttcggagtgtcgccgcgttacgcggcctgggggcgtgcttttagtgtttactgattggcggatgctgccgacgctcaccgatgccgtacagagtgcaggctgggcgtggcagggcattgtggtatgggataaaacgcctgcttgccgtccccagctaggccggttccgtagccaagccgaatttatcgtctgggcgtcctgtggcttgatgaatcccaaagcgcatccggtcacgccggtaggcgttttcccaaccggcacagcgccccgcgaaaagcggcaccaagtcgggaagccgttggcgctgatggagcatctaataaaaattgtgccgcctgcttctacgattcttgatccgtttgcaggcagtggcacaaccggcgttgccgccttgcgtgcgggacatcggtttattgggatggagattgcaccgtattactgcgatgtagcgaagcagcgtttagcagatagggcgtaacgcgccgctgagtggagcgcgttctcatccccgctgttgagcgggattttttttggctcagaccgccttcgggcggttttttgcgttctggagtccccccatgcagaccattggcgaagaaggcattgcactcatcaagttttttgagggttgcaagttgaacccgtacacgtgtcctgggggagtattgaccattggctacggcgagacgggcaagcatgttaggcctgatatgcgtcttgccaatgagcaggaagccgatgcgcggttacgtgctcgattagccaaagagtttgaaccggctgtacggcgttatgtgcgtgtgccactcaagcaacagcagtttgatgcgttggtgtcgttgagcttcaacattggtacgggtgcgttccaccgctcgacgctgttacgcaagctcaatgccggtgatgtggctggtgcggcggagcagtttcatgtgtggaaatgggcggggggcagtatccagtcgggtttaatcatcagacgtgccgccgaacgtgcattgttcgaaggcggtgactggcgtgctgaagcggagaaacagcgtgccgctttgaagagcaagggccgccgtggttgatccctcgctgctgcctgcctggtggaaggaggcgttttatgtgggcttagcgatggccacggggacgctgagttacgtcatgcgtgcactggacgctaagcagaggctggccgtttcccgcgtgttgattgagggcggatggcttacacattggtagaaaaccagcagtacaacggtacgacgcagtacggctatttttatcttgtcgtggatgatgggagcgacgcgccgccttccaatttgctgtcgacaatctataacgccatcgacgcagtgcgtccgctgaccagcaccttcggcgtgttccctccgtccgtggtgctagcagacgtcagcatgacgatcaccacagccgcaggctatgaccacgcggcgacggtctcgttagtgggaacggccttgcaaaactatattaattcgttgccactgggcacgccgctggcgtggtcgcggctaacacaggtcgcttacgacgcctccctaagcgtcacaaatgtttcggcagtacgcctcaacggtgacacggcagatattgcgaccactcaccagcaggtcgtgaaggccggaacagtctcggtggcttgatatggcaacaggtgaccaaaccgacatctttaggcgcatcaaggcgctgctcccgcaatggttcagcgacaacacgccggtgcttgatacgctgttgcgcggcttcgcctacgccacggcgttcgtgtatgttctgatcgcctatgcggcacgtcaaacacgtatcaagacggcaaccgacggttggttagacatgattgcggctgactttttcggcgcgtcgctgctgcgcaagcctgggcagtccgatgcatcgtttagggggcgcatccttgccgacctgttccgcgaacaagccactcgaaacggccttgtgaaggtgttaactgcactgacaggccgcgctccgcgcatccttgagccgcagcggcctctggacaccggaagctatggcgggccgctcatcgagtacggtctggcgggcggatatgggtcaatgctgctgccgtatcaggcgtttgtgaccgcattccggccagcaggcacgggcatcccctacgtagcaggctacggcaccccaaacagcggctatgggcaagcttcgcaagcagaactagcctcaatacgcatgattcagaacgctgtgaccgatgcggacatttacgcggccatcgacagcgtcaaacccgccggaacgattgtctggacgcacatcagcaattagcaacgtagccgcccatccccattcactcaacctggctgccttcgtgcagcttttttctttactggagacttcatcttggatcgtcaaaccgtctacgccggtgctatcccactggaaacggatttactgaacaccaaccgtaacgcactcgttggccttggaaagctcgccgccgctatgctcggtacgagctacctggcgtgtgttccgacggcaccggcgacgttgcatgtgcaggttcttcctggcgagatttacagtctgcaaaacctcgatggcaccgcctacagttcactggccgccgacactacacaccagatcatcaagcaggggatgatcttagacgcggtgacgctgaactgcccagcacccgccaccagcggctatagcatcaactacttgatcgaggcggcgtatcaagattttgacgacaacgccgtcgtgctgccgtactacaacgccagcaatccgtcgcaggcatactccggcccaagtaacagcggcacggcgcaaagcacagtacgcagaggcatttgcacgctccaggtgaaggcagggatcgtggcggccactggcacacaattaacgcccgccgccgatagcggctacgtcggtttgtggacggtcaccgtggcttatggtcagacgcagatcacggcagcgaacatcactcaggcggccaatgcgcctttcctgcccgcgggtggcatcgtgccgagtgtccagaacagcgcgtttaactacgcgctggataccggcacggcgaatacgtatttagtgtcttactcccctccggtaacgcagctgaccgatggaatggtgctgtcgtttcgcatcaaccgcgaccatgtgcgcatggtgctaatagtgcgctcggagaaataccgcccactgatggaagcaccgtgatcgccataaccccgatcgactttttaccgtggcgcattgcagccatgatcggcatcggtgcggcgtgcagctacaaggcagagcatgcgcactacgcgccgcagcgaatgagaagatacaggtgctcaccatgaccaataacacattaactgcgtcgctcaagaagcagaaccaggccatcgccgatctgcaaacggaagccaaacggcgcgagcaagcggccacggcaaccatgcagcaagcgcgacaaattaccatgcaaagctagaaccgcgccgttagagtgctgctgcgtaaaccgcctgcgggtgtgaatcagtgcattgcaacgcaaaccgcatttgatgaggagtgacgcaatgagcgaggcgcacaatgaacagcacacggcttagcgttctgtccggattgctgctccttctcgccgcttgtgcgaccacgacgcccgtatccgcaactccgatagaagccagtacgcaggtgatggtgccgtgcaagataccgataccgcaacgcacaccctttgccgtggatacgctccccatcggtgccagcatttgggaccagatggccgcattgcgcgccgagcgattgcagcggataggctacattgaagagttaaaaactgccgttaaaggctcccagtaaaataatcaccagcactttaatacatgcttattacattcattgcggagtatttcgataaattaattcattattttatatataataataaatgcatttaaattctcccaaatgggcatctgctcagatgattagaagccaacgaccttacttagagtcatccttcttttcctttagactcccatcaggattgagatgagtatctatataacgatacattaataataaggatgtggagagcgcaaccgcaagtatcgctgcactaccaagatccaatgaagaaatatccaaatccgagatcgaaatcattgaacctaaagacacgaaaagaaaagtaatagttgcggaaatcttcgctacaagtcgtccactaggcctaggaaggtgcgatgcaacaagactataaaatgcaattatcatcgtctgaaatttgttcattttatcaccgttaaaagtgggcaccaaaaagcatggtgcccacaaagaaagcatcatgagttcacagaagaaattaacttagaatctagaaacataagctattggatggttggagaatccatcaatctctgactaatgtatcttccaatcccccaacctaacccccaagaaaaccctatagcacctccaaaaagaccggctcgggatgcacccgccacggtaccggtggcggcatagactataactgtcccaataacataacctgtttcgaaatccttaatcggtccagcgccatcgacttgcattatttcagaagttgataattcacgcatattcatcattattactcttttgattaacgcatcccctgcgccttgggaccgggaacatcccggcaatcttctacccatatccacaaaatacattactgtaatatttatatcctccctaaataaacacagcgatctatatcatatgttcatgcattcgcacaattaatgagactaatttaaataacgaataggttttagccccatctgaatttcttaattaaataaaaataaaataaataatctgcactattctgctcatttggcgagcatatggattcaaccatgcaaaaggtgatgagtgcgcaggagtcacagcggcgttcaaaatgctccgctttctgatcaaagcacacttcaggaagaaaaccggaaatggtagatgagcagttggacaacgcattctccgatacgtcaatgcggcattttccgataccgccatccccgccccgtccagcagattaaccctgccggacacggggccatgatggccacccaaccccgtggccctgagatagctcctctaccggcagcttaatttgaccgctaaaaatcatttccgcatacggtttcaagcgatctataaaatcaataagttatattggagctgatagcagttgttgcagaaaagaattgcaattaactatttgatatttaaatttttccgcttatctgacagcatcgcttagtcactcgttaacgatgacattgctcactgcttgttttcgcattttcacgcattgcaaaaccacccagaccaagtgaaacaaacacgagagaactgctggccttctttaaagtgagaacagccatcgcatggtttacagggcagtacagatattgatggcgttcattcatgctggatcgcagtacacctcaagaccgaaaccagcgctgcgcgctaacgtctcatagtctggaaaagaagtcgcaacattggcgacatcttcaatacgtactgtactgacagaaagctgacctgcaattgaaaacgccatggcgatgcggtgatcgccatggctgttgatggtgccatgaccgatgggccctccatgaatcgttgccccgtcggcggtctcatccacctgaacgccaagcacgcgcaagcctgtcaccatcgcagccaaccggtccgattctttaacgcgtagttcagccgcaccactcactaccgtttgaccttcggctgccgctgcagcgacaaacaaggccgggaattcgtcaatcatatccgccaccaaatcttcaggaacacgggtgccctggagtggcgcataacgcacacgtaggtcaacaaccggctcaccaccctgttcatggcgattggattcaacaatatttgcccccatcagccgcaacacggttaacaaaccaatacgacgcggattgagtccaacagcacgcagggtgatatcagagccaggaatcacgctggctgcaaccagataaaacgcagctgaggaaaaatcagccgggattgtaatatcggtagcacataaccgttgcccaccacgcaagcgcgcgcaccctgtggaaacatcaatgtccacaccaaacgcagtgagcatacgctcggtgtaatcacgcgtcgggtgcggttcacgcactaccgtttcgttacgtgcatacaatccagccagcaacaccgctgacttgatctgagcactggccactggggagataaaatcgataccgtggagtaattgaccaccgtaaatacgcagcggtggagtgccatcgtcactggtatcgatacgtgcgcccatctgtgacagcggatccgtcacacgtcgcatcggtcgcttggacagtgatgcatctccgactaagacgctgtcaaaaggctgcgctaccagcaaaccagcgagcaggcgcatgccagtgcctgcattgccacaatccaggggaatatgcgatgcctgaagtccatccacaccaacaccatggacgatgcgctgcgtggataagggagtttcgatacgcacacccaatcgggccaagatctctgctgtagagcacgtatcctccgcctcaagaaagccatcaatacgtgacgtgccatccgcaagcgcagcaaacatgactgcacgatgggagattgatttatcgccggggatactcaggacaccatgcagtggggtgccctggtgtgcgatccaatagtcatgcgttctatgactcatactaggtttcttcaaatgagagcgacgacaatacaaaccgccgaggctgcggtaatgcgtgtcgctcctggacagaaatactcaagcatcatagaagggcaattggataggctccgaggatcttgaccttcaccgcatgttgctccaattcagccagtgcctgtttcatcggttcatcctcaacatggccaagcaaatcaataaaaaagacatactcccatctgacctgatgggaaggacgcgattcaatacgattcatgttgataccgtgacgcgcaaatgaaccaagcacttcaaacaatgcgccagggttgtcacgaataaacaccagaatcgaagtacgatcgcatccggaaggcgcaaatatccgacgaccgatcaccagaaaacgcgttgtattgtcctgctcgtcttcaatcgagtgtatgaacaccttgctcaacgcatacactcgcgcggcgctctcgctaccgatcgaagctgcatcgttagcattggaggcacgacgtgcaccttcggcgttgctggacacagggattttctcaacatgaggcagattggcacgtagccaacaggcggtctgcgcaaacgactgcgggtgcgcatagatccgatgaatgtcttcaaggcgaccactacgcgacatcagatattgatgcacgcgcaactcaatctcgccacagattttcaatttagaattcaaaaacaaatccagcgtaacctggattgttccatgacctgaattctccaccggcactactccgaaatcggtatgaccggcctcgacctcctggaacacctcctcaatactggccataggctcgccaagcacataatggccaaagtgtttgagcactgcttgttggctaaaggtgccttccggaccaaggtaaccaatcttcaatggttcctgctgggctaagcaggcagacataatttcacggaacaagcggactagcacttcatctgacaacggaccttcattgcgttccaccaccatacgtagcacctgcgcttcacgctcggggcggtagtaatccatcgcagcggcaagtttgctttttgcctgaccgacttgctgggcataacacgcacgttcggcaatcaatgtctgaatatcacggtcaatcttatcgattttagtgcggatatcggccaatgccgtgtcagacagagcaaccttgtcagcagtagtattaaccggcttagtcatttggaaaccagcttggtagtcacgagcagaaatgcctcatcgtcatcgccgctcaaacggtgtggtatgggcgccaaaatcaaccatagcgctgttgaaaatcatgcataaatgccactaatgcctgtacaccagccagtggcatggcgttatagagggaagcacggatgccgccaagcgctttatgccccttcaaggataataaaccagcggccttagcctcggcggcgaaacgagcatcttgctcaacattcggcaaaaagaacggaatattcatacgcgaacgcactgccgcagcaactccattacgataaaaaccaccagattgatcaatcgtctgataaaccaattgcgccttggcctgattacgacgcgcgaattcctgcactcccccctcagcaagcatccacttgacggtaagaccaagcaggtaccaattgaaggttggcggggtattgagcatcgaatcacgttcggcatgcgaggcgtaagtaaaaatatcagcacgcggctgaccggtacgttcaagcagagtacggcgtacgatcaccacgcaaattccgacaggaccaaggttcttttgcgcaccagcatagattaaatcgtatttggatacgtcgatcagatcagcagcaatcgaagagctaaagtcggcaaacaagggcacatcgccaacgtccggcgtctggcggaactcgacgccgtgaatcgtctcgttcgcagtcatgtgcacatacgccgcatctttagacaaacgccagccagcacggcttggaatatgctgaaaaccaccacgttccccatcggccaccacgttgatattcacataggggctggcttgcttcagtgcggtcttactccaatgcccggtgaccacataatcagcagtctgtcctggggcggcaaaattaagcggtaacaacgcttgctgagttgtcgcaccaccggacaagaacaatactgcatagtcatctggtactccaagcaaacaacgcaggtcgctctcaatacctttagcgagctccataaattcaacagtccggtggctaatttccatcaccgaagcccctactgcgttccattcaagcatttcatcctgcgcttggcgcaaaacaggttcaggtaaggtcgctggaccagggctgaaattaaaaatacgcatcgtcatccgccttttagaaggaatttattttcattgaatcagtatgccgcagctcgatagcaacatgacatgtttaaaaatacgggcgtccattctttcgagtgacattgcataaccaccgcagactgaaatgcacaccattgtttgctgtcagtctactgaatttatgcgtgaataaaatcacaaaaaaatctaaacaaaggggcttgtttccatattcttagccgactcaactggagtgtgctccactcctacgctacagaccatgacaccttcaaacaaacatgccaatcagcgtttttctgtctcacatcgacgctgtaacgacagcatcttaggatcccccatccactctatgaatgctttgcaagcaacacgttatgcaccagagagctagttcaaaagacctcgacaacaaccaattacttcgaaataaagaagcatttagcggagcaggagtgtcaagtattgttctcgaatttgaaaggcagcctcctaagcgagctttatataacctgtctctcaggtatcagcacacgtcatattgagaaaaaagcagcatcctccacatgatgagaaatgctaaattgcgatgactcgccgctcgcgcataaaaacatccatcgcggtgtctcgccacattcatactcgctcaatgagggacatatgttgcaactgaagatgagccgtaccgtaccattgagcacaccaatattgcttttattagcgatgctagtggcttgttccaagcaagacgatgaatcggctcccgtcgcagatgcacaaagcacacccactgtccaagggacaggatcagcatcgccatcatcatcacaaaatatggctttggatcagttacacgaagccgcaactcaagcgctacgtgataatcgaatgtatgcacccgccggaaacaacgccgtcgagtactacttagcactccgtgaaaaacaaccccaagacgccatcgtcaacagcgccttgactgatttactaccgtatacactcatcgcagcagaacaaagcattcaccggaaagacttcgatgaagccagacgcttggtgaatctgattgaaaaagtggatcccaacgcaccagcgttcccacgtctgaagcaggcgttaatgagcgacacacatacaaagaaatcagactctcaaaaaatcgtagaacataattccaataagaaaaccagtgagcaggcacgcgaaagcatggctgagcaacgtgaagtggccgagcaacgtgaaagagtccgtcaggaaataaacgatttcgaacgccaaaccccaatcaaacgcgatgttgagcaacgcaccacacaacaacttagcccaccagtagcggtgccgatactgatacagccttcagtcaaaacacaaggatctacagctgctgtcactacaacaacgcccactacaacaatatccacaacgacaccacagacacctataacaacagctgtacctgcaacaacacagggaactgcactctcacccatatcggtaaaagccccccctatagcaccaagcctacggccgatcagtacgccagcaccaaggtatccaatagaggcgctacgcgccggtatctccggggaagtggtggtggaaatcaaagtaggcactgacggctccgtcgccaatgcaagagtgctgcaatccacacctgctcgcgtatttgatcgagaggcactgcacaccgtcaaaagctggaaattcgagccaatgaagatcatagtcacgacgcgccgcacgctattgtttacgccaggtaactgagagattcagcttggaatacattgccagagatgcaaatgcaaaggcttttatccgcctttgcattcgatgtgcaactcagtacacacttaatcggaaattgcaagttgctccttatagtaacgccgtaccgccgcccaccataacagcagagccaaaccaaaactcatgcttaggtaaattgcccatacctcaatcccaaccacttcatttctgatcactttctgtaataactggttttgtgctaagaatgggatcgcaaattgccatagctgactttttaatggatacgccatcatcgcgtagctgggcagtaccggcagcaatagcaaccatgccatatgggactgcgcttctttcacacttttagctgcagcagccagaaaggttaacagcgcggtccccatgaacagcaccggcagaagaataaacagcatctgtaacatcggtatgaacccgacattgagctgctgactcatttcagcacttgccagctgggcgctgagtttaaatgcgagcaacgtcagtaataacgagagcaagccaaccgcacaggctgcgacaatcttcccagtcacaatgatgtgacgtgacactggtgtcgttaacaatggttccagtgactgccgctcacgttcaccagcagtagcatctaacaccaacgacgcaccaccgatgaaggatgtaatcaccagcaacatcggaagaatcaccgacatcaacaaagcacgtttggcatcgggcgttgccaaatcccacgtacttatttcgatcggacgaaccacttgcggatcgatcccccttgccagtaaccgcagcatgccgacctgctgactgtaagcattcaaggcgtccttcaaccgtgcaaccgggatttcagcatcacggcgcgtggcatcgtacacaatctccaccagggccggacgtccttctcgccaagcatcggcatagcccggatcaatacgcaacgcaacgtcaatctgctgtgtgtggatcgccgtgaccacatcacttgaaggggcaactgcatttagacgtttagccgcaagaaaatttatcaaggtaggcgcgtactcgcgtccgatcgtaggcacttccagcaactgatccacttgcgtcttgacccgcgactcgctcagcatccccatacctagaataatcaaaggatagagcagcggtgtcagcagcagtgacagaacaagggtgcggcgatcacgcaggatatcccgtaattccttgcgaatcaccgtccataaagtagaaaacgcactcatgcatgcagtccttcatctgaaccaactgcatcaatgaaagcatcctccagattgtcctttccagtgcgcgcgcgtagctcatcgccactaccggccactactaccgtgccgttggcaatcacaatgatgtgatcacacaacgccgccacttcttgcatgatatggctagagaaaataatacagcggccttcggcgcgtagctgacggagaaaatcccgcaacttacgtgtggtcatcacatctaaaccattcgtcggctcatccaagatgatgttacgtgggtcatgcaccaaggcacgtgcaatcgcgatcttagtgcgctggccatggctgaaacccgcagcctgacggtcaagaatgtcatccatatccagcgccttcgacagtatggagagacgcgcggcgatgtctatgcgggacaaaccatgcagttcaccgaaataggcgatattctcacgcgcggtcaaccgcttataaataccgcatgcatctggcaatacgccaagtccacgacgaaccgtcatcggatcgcttactgcgtccacaccgtcgatgctgatgcagccctgatctgggatcaatagcgtatagagcatgcgcaaggtcgtcgtttttccagcgccattgggaccgagtaatcccgtgattcgaccatcagcagcgtggaaactgaggtcctttaccgcattaaccagccccttctttgtcttaaaggacttatgaagatgttcagcggtaatcatggttcccacccgttgaacgaagtgaatactggcacgttaacgagatgctgcacacaggttgtatcaagggacgtagcatcagcacgatcaataaactggccaagcaatttggacacgcatccaacacggatagtgccatggccctggcccggtgccacgatgtgacgaccgtaacgcaagcccttaagcaacttttgggcgtaatggggcggcgtcacaggatcacgctcacctgagagcaacaatgccggaagatcggaaaccaacggcatcatgaagtcaggcggacggatgccagtaggccaaaccttgcagggcgtaaaaaacatctgtgcaacctctgatccaaacagggcaccaccagcaccagcatttgcactagccacgtagcggtccgcatcttcggtgcaaataacagcccattgcaacgcatggttcatctgatcgtccatgccaagcccgacaagttgagacaacgacatcaatggcgcgtaatgccctgaagcggcctcattcaaaatcaacggcaacaatgcaatcagctctggtgcatacgagagaccaaaggctaagctaaccacggtgtcggcagtgatacgacggcggcgcatctcaccggaagcaggatcctgatactccacctcgctgccctgacggagacgctccatcaaagtacgcagttgctgccgactgtcaatcggaaaacgcttggcgcaggatggatccttacgacactgcgcatcctgcaacgcaattgcattctcgaatgtggtagcaaattcactaccgatcaccaagtcattcggaaccactccgtccatcgtcaaggtacggacgtgtgcacgataacggcgcgcataatgctgcgccactcgagtgccgtaagagacgccaatcaggttgattttatccacgctgagtgcagtccggaccatgtctaaatcggtgaccgcttcggtagtggtgtaatagcgaggatcagcacgcccctgtagcgaagcagcgcaacgctgtacaaaggcgatgtattgctctggtgtcgtggtgttctctgcctccagctgaaacgccctcccctgcgcatctacgcaggtgagcggatgcgaaccacccgtaccacgctgatccacgaaaaagatgtcacgctttttacgtacctcattcagactaggtgccaccgcagcaacgactccagttgctgattggcccggacctccagcaatgaaaaaaaccggatctgaggcaggatgactaccgctgtcacgctccagccaagcaatcttcagggtaatcctacgtccttcaggtaacgcaggattctcaaggaccggcagttgcgcgcagagcaccctgatgtgcccggcaccacgggcactcagtatgcagggttcaaaacgcaaacggccgtaggagcggaccacaggttgcaatgttgcagctgatgaggcttcaaatgacgaagcggctacacgcgttgggaaataaacaaaaacaccccccacaacaagcgctagaactatccaatatttcttcaacatccttgttccttctcttcggacggtacatccatgctccaaggtatcccctggaataataatttagtaaacattcattcattgtagctggatatcactcgcaatcgcacttcattgaatactgtcgatgaacaatagccaccgcgcatcccgtcactgctcactgcatgcgttgcaaaaacacaagatcgtgagaatgcactaacgcaatcggcggcaatagtctatgaaggtgaacgggtaggcatgacgcccatcgtcctgatggggttcacgcttcttgatctcccaatcgacggcgtcgaacataggaaaatacgcgtcagcgcccgcaacggccacatccacgtgagttaagtacatcgcattggcgtgcggcaaagtcagtgcatacagttcacctccaccaatcacacttaacgtgtcggcaccctctgcagccgcctggacgatcgctacatcaagcgaatccaccgcccgcatttcagaaaatggcacgtgtccagaacgcgtcaataccagattggttctccctggtaagggacgcccaagggaatgcgcagtcttgcgtcccatcagcaccggtcgacctaaagtcaatgctttgaaacgcttcagatcgtccggcaagtgccacggcaacccattatcacgaccaatggcgcggtaacgatccaacgccgcaattaaggaaacaatcatggcactacgtacaacacgttgtagatattcattattttctctggctttcttgagatgcgtgtccactcattacgccgactggtctgagtggccaactgatgccgcagatcacacagccaccggtgccttgatagccggatatggatcgtaaccttcaatcacgatgtcatcgtaggtaaagtcaaacaagtcagtcactgccggattaagcattaatacaggttgcggtcgcggcacacgctccagttgcacggatgcttgctcgacatgattcgcatacaaatgcgcatcacccaacgtatgcacaaaatcaccgaccgctagcccagtcacctgagccaacatatgggtgagcagtgcataactagcgatattgaaagggacaccaagaaaaatatcagcgctacgttgatagagctggcaactcaatttgccattggcaacatagaattgaaatagtgcatggcacggcaccaaagccatctgtggaagatcagccacattccaagcactaatcaccaagcggcgcgaatctggattacgcttgatctcctccagcaaccaacggatctggtcgatctcgtgaccatccgcgccagcccaacggcgccattgcttgccgtaaacaggtcccaactcacccgtagcatcggcccactcgtcccagatgtgtacctgatgcttcttaagataagcaatattggtttcccccctgagaaaccatagcaactcgtgaatgatcgaacgcaaatgcagctttttagtcgtaacgagtggaaaaccttggctcaagtcaaatcgcatctgccaaccgaacacactgcgtgtccccgtgccagtgcggtcaggcttttgtatgccatgcacaagcacatcattcagtaattcaaggtactgcttcacttagcgacctcaggggcaggcactggctgtaatactggtgagcggcacgacaaccagaacaggaacaatccaatcacgatcaacggcaagcttaagatctggccgcgagtcagccatccgaacgctacatagacaccattgtctggcatacgcacaaactcgaccaagaaacgaaacacaccgtacaacagcgcgaataatccagacaccgcataacgtggacgtggtttgcgcgaaaatagccatagcactatgaacatcaccagcccctccaggaacgcttcatacagctgcgagggatgcctggcatagtgacccagaagtccagcggcataatgctcttggatctgcacaaaattcatcacatcctgcatcgcaagctgcccagcaggcacatcgctcagcggagcacgcgggaaaattactccccagccattgtgggtgagcttgccccaaagctcaccgccgatgaagttgccaagccgaccaaaacccaagcccacggggaccagtggtgcgccgaaatcaagcacatcgaacatctgcaggcgatgacgccgactccaccaagcgactgccagtaggacgccaatcaaacctccatgaaagctcatgcccccttcccacactcgaaacagcagcaatggttcttgcaagaagtcatggaacgcatagaacagcatgtaacccacacggccacccaacaccacacccatcatcgcgtagaacaacaggtcggaaaaaccatccatgttgacaccaagcaaacgcccggcctggatgcgttggcgtcccaagcaccacgccgccccaaaacttgccaaatacatcaagccataccaatgcaccttcaccggaccaagtgagaaagcaatcggatcgatagcgtggagataaatcatgtgaaaccgtgccctgcccaaaagcgagaacgcccattgtgccaccatgcagccatcctttagataaactgcaacaagcaaaagcactaaaacagacgcggacctaagatcaacacccagcaaagcaccacattacccaaagtaatgaataccgcagcagagcccatatccttagcacgcccagcaagttcatggtattcaggcccataacgctcgatcactgcttcaatcgccgaattcagcaattccaccgccaacaccatgaataagctgccaaccaacagtaccttctccaccggggtttgccccagccacaggcccaatggcccaagcagcagtagcaataccacctccatacggaaagaagattcgtgcaaccaagcggcacgcaatccctttaatgaccagattgcagctttgaaaatgcgccgcggtccacgcggaatgtgcccaaattggtcagccattaatttgacagaagttaaaaaaactggaacgcgaaagatcgtcccaatcacgccgttgaagggtgacgattctgccacaacaacgccgccatcttcatcggaagccatccatattccgatggaatctattcgtaatctctgtcaaaaagaagcattgcacaatgcattgtccaacaccttacacagatgcaccgactattcagcgcaagcatcgccaacgtctagtaggaatatttaatttcttttggcaccaatacagcacctggttagagagtttcatatgacgattaactatcaatccattgattgttcgatatcgaccatccggtagcctgcactctgtaccgtgtgtaacagcggtcggccaaatggcttatcaaccaccttacgtaggttatatagatggctacgtaaggtatccgaatccggcaaacagtttccccagatttcgcgttcaatctcctggcgactgacgacacgtggcgactcccgcatcaagatcgtcagaagacgtagcccaatcggggaaagttgcagctcagtaccggcacgggtagcacgcaggctcaccggatccaggacaagatcagcaagcttcaacacttccgcaccaacttggcgacgctcccgacgaatgagagcacgcaagcgagcttctaactcctgaattgcaaatggcttcgtcagataatcatcagcaccgaatcccaatccggtgagcttgtcgtccagtgtgtcacgcgctgtcaacatcagcacaggtgtggatttacgtgcgtccttacgtagctggcgacaaacctctatgccgtccaggcgcggcaacatcaaatcgagtaccaccacgtcatagctgttctcaacggccaaacgatagccatccaaaccatcgacggcataatccacctcaaagccacggccttccaagtattcgccgatcatctccgagatgttgcggttatcttccactatcaggacaagccctgaggtttccttggtctgacgcatgacagctcccaattcttcaggtttgtgaaatcgtgctgcatgaccgtgtagaaatagcgtgaagatcctgccctttattggggtacattcagtgagcgtttctcaaaatcctgacacagatacgctaaacgcattctcaaacaccggaaacaactcagtattcatcacgtgtccaaccaacctgcacgcatcaggacggcaacaccacacctcactatttccatttcatagtaaggaaaacgatgcacctatcaccaagctcataggaaatcaggcaggtgcaagtacagcaaccaaaaataagccgctatcggtacagagatagacgatgccaaccatccagccccctcgaaccaggcaattgtattgctagaatccgacacctgattgagcaggccacgttgcatcttgagagtgatcgtaaacacggaatgaaggctctgtcttcattgtggcgagcatcctccaagacacagtgctcactgttctggccgagtcaacacgcaaccaatgcggcgcatatcgatctcatcggcagctcgcatcagtgcaacatgatcgctcccagggtcaaagctaatccgaaaatgcagttcacctgctggcgtacgcgatgaatggatcgaggacaaattaatcgcatgctgctcgaacacgtgcagcagcctttgcaatgaaccagggcgatcctctggaaggtacacgctgagagccaacggctcggtcaaatcagccaacaaataaccgatgcgctcgtaattatagttacctgcaactaacgacgcttctggaaaaacttggtggtttgcttccaaaaagtcggctcgaaatcgagtacgtgctgcatcatcaccacaactcaccaatgcacgcagttccagcaagtgactaagcagatggtctagcatctcaagcacatacgaatttccaaactggatatcctcataaatcgacggattcaacgatagaatccgcgcaatcatcgccatatccaactcgaatgacatcgaacgaaatgacatgatcgactgaaattcgcccaatagcggcaggtaatcacgtaacacacccgcctgtgccaagtgacaggcatgtaccattgcctgtaccaacgccatcagccggtcatggtgctcgggcgtcgcagccacacattcggcctccaacgcctcacacaactgcatcaaccacggacgccaatgatgtagccgcgcctcgcagaccaccaacacccggcccttgagcgtgggtgccttgggtggtgcagtcataggatgcaacccaactacctccgcttgcgaagccaacattgcttccacgggggcctgcttgattgaggtcacatcaatccaaagctgcccagcgtcagtgccatcagccatcgccacatattcaccaatcaaggcagcggtttgcctgatcggcacagaaaacaccaacacatcagcacaacgtagtagctcggctggggatagcgaggctggatctgcaggatcatagccaatcaccttcaagcccatacgctcacgcagaaagcgtcccaaccagtgtccataggcaccagcactgccgacaataccaacaacgggagacgcactcacaccaacatccgtttacctcaccagccgaaagcaatgatggcccaaacgcaacgcgggcattcattcacttaagacgtcatccggtcccagaagctttttacaccatcaagaaaagtagccgatttaggggaatgcttacgcgcatcctcaccagcgaaagtcatttcaaattgctctaacagcttacgctgctcagcagtcaagttcacaggagtctcaaccacaatacgacagtacaaatcgccttcagtacgactacgcaccgagcgtacccccttgccacgcaagcggaacagtttaccagactgggtctccgcaggaatacgaatttctgcttccccatcaagcgtagccacacgcacaatgtcgccaagcgcagcctgtgaaatacgcaccggcacttcacagtgcaaatcatcaccatcacgctggaagatcggatgctcacgcacacgcacttccacatatagatcccctgggggcaccccctccggaccctgctcgccctcaccactgaggcgaatacgatcaccattgtccacaccagcagggatcttcactgacagcgtcttatgatcctcaacacgcccagcaccattgcagaccttacacggatttcgaataataacgcctcgtccgccgcaatgcgggcaagtctgctgcatggcaaagatgccgcgttgaatcctcacttgaccgctaccgcggcacgtaccgcacgtctcgacgtgaccgtcttctgatccactcccatggcagtgggtacattcaaccaaagtgggtatctggatctgtcgctcaacaccagcaacagcttcctccaaatccagctcaaccatgtaaccgacatcggcgccacgccgcgaagcgcgcgcaccaccaaaaatgttaccgaagatatcaccgaagatatcgttcatgtcgggggcatttccgccccccacgccatgttcgaaagcggcatgaccatgcgtatcgtataactttcgttttttcgtgtcggcaagaacctcataagcttccttgcattccttaaaggccgcctccgcagctgcatcaccaggattacgatctgggtggtatttcatcgcacagcgacgatacgcttttttcagatcatcttcgctggcagtgcgaggcacacccaacacttggtagtaatcacgtttactcatggatagcagacatcgatagttaaagaaacggcactcaatcgaaacatgcagagagcgacaatgtcatggtaaaaccgcgaagggcaaagcgtttgctccgcccattcgcaaatccataccacttcggcataaagaacttattttttgtcgcccttgacttctgtgaattcagcatcaaccacatcgtcaaccttggctgaagagcctgcaccagcccccgtgcttcctgattgctgctctgctgttgctgccatgtgcaacgactgtgcaacttcctcaagagttttagatttcgcctcaatctggtttttatcatcacctttgacggcagcctcaagctctgcaagggaggcttcgacacgcccaatcacctcacccccaaccttactaccatgctccttaatggccgaacgggttgaatggatcaaaccgtcagcatggttccttgcctgcaccaactcttggaactttttgtcttcctcacgatgtgcctcagcatcggcaaccatctgttgaatctcactatccgaaagtccagaaccagctttaacctcgaccttctgctccttattggttttcttgtccttggcagagacatgcaaaataccgttggcatcgatatcaaaagacacctcaatctgcggctggccacgcggcgcaggttcgatacccgccaaatcgaatttagcaagcgatttattgaaacgcgcctgctcacgttcaccttgcaacacatggacagtcactgcggactgaccatcctcggcagtagaaaacacctgagacgctttggtcggaatggtcgtgttcttctcgataatctttgtaaacaccccacccatcgtttcaataccaagggataacggggtcacatccagcagtaacacatccttcacgtcaccagccagcaccccaccctgaatcgcagcacccaatgcaaccgcttcgtccggattaacgtccttacgcggctctttaccaaagaagtcggcaaccgcttgctggaccttcggcatacgggtctggccaccaaccaaaatcacttcttgaacatcactggtacgcaaaccagcgtcgttcaacgcaatgcggcatggctcaattgacttacggaccaaatcgtctaccaaggcttcaagcttggcacgagtcagtttgatattcaggtgcttcggacccgatgcatccgccgtaatgtatggcaggttaacttcggtttgctgggaggaagacaattcgattttagcgcgctcagcagcatcctttaaacgttgtaacgccagcggatccttgcgcaaatcgatcccctgatccttattgaattcatcaaccagataatcgataacacgcttgtcgaaatcttcacctcccaagaaggtatcaccattggtcgccaatacctcgaactgcttctcaccatccacttcagcaatttcaatgatcgagacgtcaaaggtaccgccgccaagatcatatacagcgatcttgcgatctccgcccttcttgtccaaaccgtaagccaatgccgcagcggtcggctcgttgataatacgtttgacatccaggccagcgatccgaccagcatctttcgtcgcctgacgctgactgtcattaaaatacgccggcacggtaatcaccgcttcggtgactttctcgcccaggaaatcctcggcggtcttcttcattttctctagcaccttggcagagatttcctgcggcgccagcttcttagcatcagcagtggccacccaggcatccccattgtcatgctgagtaatcttatacggcaccaaatcaaggtccttttggacctctgcatcaccgaacttacgtccaatcaaacgcttaaccgcataaaaggtgtttttcggatttgtgaccgcttggcgcttggctgcagcaccaacaagcacttcaccatccttggtgtaagcaacaatggaaggagtggtccgatcaccctccgagttttcgatgacacgccctttaccgccttcaataatcgctaagcacgaatttgtggtgccgaggtcgataccaatgattttgcccatgagagtagctcctgaaagttttgaatcaaattcccagcggtgccgggatctgtttcgaatgtggggatgaccgacgcctgctcaagcggctgtcaagacgttgtactgcatgaacaataagactcaaaagaactcaatcctgcttggcaaccaccaccagagcagggcgcagcaaacgttcgttgagcagatatcccttctgaaacacctgaatcacataccctggttcgacgtcagtaacctccgtctggctgatcgcttgatggtgttcggggttaaatagctgacccactggatctagaagcatcaaaccgttgtcagtcgcaaccttcaacaactgcttgtaagtcagctccagaccatcgcgcaacgggcttggctcactaccggaagcagtcaatcccgcatccagactgtcaaacaccggcagtaactcgccaagcagcttttcattagcgaattttcgcgcttgttcaacatctcgaatgaggcgcttgcgctgattctccagctcagcacgctcacgcaatacatccgccttaatcgacgcaatctcaccacgcaacgtctcaacctcaaccttaagcggatctgtttccggtgaattctgcgtcagctcttcagaatcacattcggggtggtcttgattcatataaaaatcctgagtcggcggaacgcccgcctcgaccccaacccgtatgtgggcaagccgccagctttcaagccacccaggcatgattcatcaaacgatggcgacaatgcaggtcaactgacctaaggcatcgttggcggctccagtgccgtacccagcacctgggctacaacctgcaccaaggggatgacccggtcatatgccatccgcttgggcccaatcactcccaacactcctaagacctgaccgtgcgctgcatatggcgcagtgaccaacgaaatatcctccatcgaaaccattccggtctcctcaccaatgaaaatacgcaccccaggtgcattgatcgtacgctcaagtaattgcaggatctccctcttgctcgcaaatatctcaaacaactcacgcaagcgatccatgtccgaaagatcctgaagcgccatcaatcgggtctggccagtgaccacaatatcctcactatcgtttggcaccagcatctgcgaagcaagatccaggctatgtgccaacaactgttccatctcgtccttggccttgcgtagctcgcacagcacagtggtacggatatcggccaatgtgcgcccgatgaagtgcgcatttaaataattgctcactcgttccagctccccaggctcgtagacacgacgcggctctatgacccggttctgcacctcattgtcagcaaaaattaggatcgccatgatctgacgcgcatccagcggcacaaaatcaatatggcggaatacgaactgttcacgccgtggggcactgaccacacctacaaaatgggtcatcgccgataaaatttccgatgcattacccaacaacgcctgcgtgcccccaccagccatctcaacacgtagccgacgaatatcatcttcactgggaggctgcatctgtaccaaactgtccacaaacatccggtacccgtgtgccgtcggcacccgccccgccgatgtatgaggcgaattaagtagaccaagttcctctaagtccgccaggatgttacggatcgtcgccggactgatgtcgagtccagcctgctgagccagcgtcttggaaccaaccggctcaccgttctggatgtagcatgaaatcaacgtccgcaacaattgtcgggatcgggaatcaagcgtaggagaaaaggaagcgcacatggaatattggtaagacgaagggaaacaaatagtttttcgggagaccgttggcaagattacccattccccaccctctcaactcgctctaaagttttttaatcgatactgctctaacgccatgctcagacatctcacgattaaggatttcgctgttgtccgtaacatcgaattagaatttggtcctggtatgaccgtggtttccggcgagacaggtgccggaaaatcattgatcattgacgctctgggtttcctctccggactacgcgccgacagcagtgtcgtccgccacggagctgaacgggccgaattatcggctgaattcaacatcacgatacaccaccctgcccgcgtctggctgcgcaacgtagagcttgacgacgccgaccaatgccagctacgtcggatcatccgtgccgacggtggctcgcgtgcatggatcaacgcacgcccagtcacactatcgcaactaagtgatctcgccacccatctcgtcgagatccacggccaacatgagcaccaaacactgctctcacgtcaaagccagctcgtactactggacgcctacgcacaaaacgaaaccgaacgcgacgcagtgcaacaagccgcagcacattggcaagcactcctggacgaacgcgatgcactacaggcacaaggcgatatgtccgagcgaatcaatttcatagaacaccaactgaccgaattgcaacgcgaaaatctggatccggccactatcaccgcattagacgccagtcatcgacgccaagcccataccgctgcgctcatcgaagcatgcaagaacactacccagacattaaatggcgacgacaccacctcagcgttgcatctgctccatgcagcccgtcacaccctcagccgggtcaccgaacacgatgcacgattaggcgaagttgaaactttactagacaacgcaatgatccaagtggacgaagcgctgacattattagatcggattcataacgatctgaacattgaccctgaacaattggaagccatcgaactcagaatcggacgcctacacagcctggcacgcaaatatcgctgcacaccgcttgacttagctgcacagcgcgaccgtatggccgccgaagtcgaatcaatgcgcaacatggatatacacctgcaacagctggatcatcggatcagcaacgccatgacaaagtggcggcaagcagcggaaaaacttagcatcagccgcacgcgcgctgccgcggcactttcaacaaccacgacaaacctgatcaacgaattgggcatgggcgggggacagcttctgatccaactgcaaccacacgaaaacaatcgaccacatcctaacggtgccgaacgcaccgaatttctcatcgccaccaatccaggccaaccaccacgaccgctacgcaagattgcctctggaggtgagttgtcgcgcgtatcgctggccatcatggtcgccgcactaggcctggatacagtgccaacaatggtctttgacgaagtcgacacaggcatcgggggcgcaatcgccgacatcgtcggccaaaaactacgcgccttaggcgagcaacaccaagtattatgcgtcactcacttaccacaggtcgccgcaaagggacatactcactaccgcgtcagcaagatccctatagacgggatcacgcaaagcgccatctgcctactcgactcacaagaacgtcaagaggaaatagcccgcatgttgggcggcgtacacattagtaaagaagcccatgcagcagcaggcaaacttttacaagagttacaggagatgtaactaacgtcgcaacaaacgaaaggttgctttacaggccaggaaggcatccatgaagcactgtacattcaagaaaataactccacgctccccctaccctcacaccacattgttctcccgttacacgcacggaaacgcactcaccatcaacgaccgcgttttttacgtacgtacaagaccaacgagtgttcttccaactcataaccgcgttcagcagcaatgctgcgctgcaacaactcaatctcctcgttgtgaaactcaatgatcttaccggtatcgacatccaccatgtgatcgtgatgtccgccacggtcgatctcgtagaccgcctgcccgctctcgaaattatgcttaagcactaatcctgccgcctcaaactgagtcagcacccgatacactgtggccaagccaatttcgttaccctgctcaagcaactgccggtaaatgtcttcagcactaaggtgatgttcactactggactgttcgagcagttcgaggatacggatccgcggatgcgtcaccttcaaaccaactttacgtaaatcatttaattccattgacttctcaattgatggaccgtttagcatccgcgacctcgtgaatcggttacggcaaccgcataggagtgtatcatcgtgcaaatatttacctgttgactgctaaaattccaatgcgcaatctcctcctagccgctgcccttcctctcctctttaccgccggttgcagcatcatctacaaacagccaatttatcaaggcaacttgatcaaaaaggaagctgttgaccaattaaaagttggcatgaataaacaagaggtcgccttgctgctcggtacaccgtcgatctccgacatatttcacacagaccgctgggactatacatctgcgcaacgcattgaccgcatagcacacactgaaatcaagaatctcactatttactttcagaacgacctagtcacccgatgggaaggagactacttcccgaaccaagatgagaaactggcagaatcggcacgcaagcaattcggtccaaacctctccagaaaagaacacggtaatcgctgaacagattctatcgaaacgatagacgtatttacgccgacacagcacgtcggcgccgtgcctccttaggatcaatcaacaaaggacgcaacaattcaaccctatcgccctcgttcaacacatggtctgatgtaaccaaaactccgaacactgcataacctactgcctgttcgatcccatttaacgcagccatctccaccgcatcgaccacccttgccccttcttgcaacatgatctcacagcaatgaacgcgatccggccaagcaatcagcacttcaactctcaccactgccaccacaatcagcaatgcgaatgaagtccttgaccatgcgatcagctaagccattgaatccaagtgtcaacgccggattcaacatacgagacactggctcgaactccagcctcaaactgaccttgcaagactcctccgccaacatctggaaatcccaacgtccttccaaacgcttgaatggcccatcacgtaacttcatatctatctgagatggccgcttcagggtattgtcagtgataaaccaagtccggaacgctcctacaaccacatccaaccgcgccatcaaacgatgttcatcatgctcaaataactgcgccgaatgacaccaactaaaacggctaggataagcagtaatatcgttgacaagatcaaacatacaacttgcgctgtggcagaccaaagcgctacggcaaataataggcataacattaggcgtgacaaacggacagattcgttcacaagaactctattcggggacaatagccgcatgaacaacaaacatcccgagaataaagcaaagagcacaacaactccaaaaaccatcgctctgaacaaacgtgcacgtcatgaataccatctgattgaacgccatgaagccggtctggaactgcaaggctgggaagtcaaagcaatccgtgctggccgtgccaaccttgctgacggctatgcctacgtgcgcgacggcgaaatctttctcatcggtgcccaaatcactccgctcatccaagcatccacccacgttgtcgccaacgaccgccgtacccgcaaactactgctgcaccgccgccaaatcgacacactgatcggacgagtacaacgtgaaggcttcaccctggtcccaaccgcgatgtactggagcaaaaatcgagtcaaaatggagattgccctagccaaaggtaaacaggcccatgacaagcgccatgcagagaaagaacgcgaatggcaacgcgacaaacagaggatcatgcgggctcataatcgcaacgcatgacaccgaacaaatatcaaaacaatcaaaatatgaagtatcactgaatataaacgaagccaaaaataaatcgcatcatctaacccattgcaacaacggtcacatccaccgtgaggttaaatttattttcctcaacccatccgcaaaccaaaaaaagagccacattatgtggctctagaattaagtattgataatagcgctgttaaaaacggccgcccaaactcaacgtcccactccaggtcctatcacccagtgccctcctgctgacatcgaacgtcgccccccaaaacatcgttggacttaggcgatactccacaccactgcttattgtccctatcacgcgcttcatcaccatttgatgtgcaaagccaccaatataatcagcatgcccgccatatactggatcatctccataaagcctcctatcaatttcaagacctgccatccatttcagacgtgctgtgagcggcaccgcaacatccgcaccaacatacgcagaagtacgccgattattgatcgcactatagctgaaaggaaacgctgcattctgctcgctgtatgcagtacgcaagacactgctatggcgcactcccagatgccaccccaataaaacactgtgatcggcattgaaacgttgccctgcttccagcgagacatcccgacctttcatacgactgtagccggttcctgcctctgtatttgttaacaacggacgttgcacaaccacgctgtaccgattgaacgccacagctggacgtacataccattcacctcccctaaagggagcattccattgtgcataaaaccctgcgcccagattgtagttgttcttgagataactgtcctgcaatgagcgggacagcgaacggtccagcgagaaacctgcagacagcgtttcaaacatggcataaccgaatctgaaaccaacgacactgtcccgattgctgcctgtagagacgaccccagtacgcacagaccagcagacctggctgtcatcaatctcacatccttgctgtagaaggatgagtccttggcgctgcaaatccataactgaaaatgtctctgcggccaacaccgataaggcacctatggtattgacagtatctaccttgaccacggtaggttgggattggggctgagattcagactgagattgcgttggataaatgatcttccagacagtggcatggtcttttcctgaatctacttcagaataccctgctgcaactgttccatctgcagagagtgcagtagaaatggaatatcctgagttatcactttttaatgttcccagatcgattttcgtttgccagtgatcccccaaccaaacagtggcacgccctatagaggaatcagattcagcaaaccctgtagcgattttcccatcagcggaaagtgcataaaccaaagaatttcctgaattatcacttttcaatgttccaagctgagttttcgttgtccattgatcgccagaccagatggccccataaaaaacactgccattttccatagaaaaataaccacctgccactttcccatcagcggaaagtgccctcacctcagccccttcggattcgttattattcaatgttcccaagtcagtttttattccaaaaccatcgcctgaccaaataaatgcatgcgtaaaatttttggtatcatttctactttttccttctaaaataccccttgtaatattttttgaactaatataccccccagcaacctttccatccgtggataaagccctcacctcagcatcataatattcttttggcacatcaagatgttttatatctttccaatgacttccagaccagataattggaacaagatgagtagagaaaccgtacccaccaatagtttttccatccccagataatgcattaaccactccggattctaaaatccccaattcaagcttgacttcattctcccatgaatcaccagaccaaatgactggaataaaagtagctgaaacaccatcattggctagaaactttccattagatgccttcttctccaaattggcactcgaactagattcatgaattctgatgtattgataaccaccggcaattgatccatcagcagacaatgctttcactttactacgcgcaaaagatgctccaatattaattgtatccttgagattattccatgaccaaatagttgcaatatagtcattaccatcaggagtaacaaatccaccaaccaccctaccatcctttgagagagcattaacataggaatattgagaaccatcatttgtcaacgttcccaaatcatatttgtttgatactgatggcacgctcccattcgcatatacaacaccgcccccacacatagaaaatacgataaatacagtcaaaacttttcttttttgaaattttaatttcataataaataatccatgaattcttagagcattatcaatcacctaataaactttcttaatacctcaacgcataattagagtaacaacccaaatagtctcatattttttaattcgtttatcacttacatcttaaataattttatacatcacagcctaaatagcgtctgtagaaaaataacgaataccacagattcatacggcgtgatcaataggacgagcaagcactcttattacccactaccctctttaaagcacccacacaaaatctcaaatggacgtcaacatttaaattttcttcatttccccataacaaacacccattggccagagactgcataccggacatgtcatcgcacaattggacacatcacacaccggcaaacaccattcaacgtatccaagccccccctgctcgcagggcctatgtcctgcatcaccaaataacagacacaacacatgtacttaccatctgccccttattgcgtccttgctaacatctagtgtaatcattccaagctcatatcactgggaaatatccaaaatcaaaatcattcccgctacaccgctttaacttacctgatcagaatcgcatacaactcccacacaacagcaaccaacataacggctaccgatagacctgctgccaatacgaaatgcccgcccgcattaaaccagccagattaactccaactcgacacgcatagagcatctcaaaaatgatcgcatcaatagatgtcgatagatttctggaaatacctaccgaagccagtcttattcagatacgaggatatttaagcaacccaataaaaatgcgacgcccattgtggagcgtcgccaaaatcgctgatcgtaagttttttagcacacacggcgtactgtgaagttttaattgaacactaggatggttgacaccatctacgcggcatttcttatattggcgtgatattcgatgcttggggacccttcgggccctgcgtcacgtcataagtaactctctggccttcatgcaaactacggaagccttttgagttaatccccgaatagtgagcaaatacctcgggagtcccatcatccggtgaaataaatccgaatcccttttggtcgctaaaccacttaactgtaccgctctgcatggtgatgcgagacctttgcaaattgaaatgagtagtgtacgtcccctagcgcacagactgagtatgcaaagcttgtgtccgaatgacaatcactctcgcgcaactttactaattagttccggaagactgtcgcaacattggacaaaatttctcccattgtgatctcagcgccatcaccacaacccgccgcccagttcgagacaatccccaaacacgcatattccagccccttctcacgcgccaacgcagcctcaggcatacccgtcataccaactaagtcacacccatcgcggcgtaaccgagcaatctcggcaatcgtttccaaacgtggtccctgagtcacaccatagcaaccatactcgaccaaacttacatccacatcacgtgctgcacgcaacaaacaaccacgcagcaacggagaataaggatgaccaaaatccacatggagcacctcactccccacttcctcacagaacgtggagacacgcccccatgtatagtcaatcagctgatcaggacaaaccaacgtacgtgggccaaacgcctcattgattccaccgacagtattgagcgccagcacacgactgacaccaagctgctgcaaagcggcaatattggcgcgataattaattttgtgtggtggcaacgcatgctcctcaccatgacgggcaaagaaagccacacgctggccaaacaacataccaacacggattggaccagaaggacgaccatacaacgtctcaacctcatacacctgtacatcgtcgagctgagacaacgtgtaaacaccagtaccaccaatcaccgccagagcaatcgtttgcatactattgcctcatcgcataaattgccgggatgccgcgcagctgccccgcgatgtccattccaaaaccaaacacatagcgatccggaacctccacgccataataatctgccctcatattgggtatacaacgatcatgacatttgaccatcagcaccactagcgacacatcggtagccccctgctttaggcaccactgacgtatctcagacaaggtatgaccctcgtcgagaatatcgtcaaccagaatcacacgacgaccagacatagcactgaccggataatggctccacaccaatgcaccgccagtctgctcaccacggtaacgcgtcgcatgcaaggaatccaactctatgtcctgaccacgctggcccagctccaatgccaattgacccgcaaatggcaacccaccatgcatgatggtgacaaacaacggcacatcgccctgatagtcctgggcgatgtcatcggcgatatgcgcaatagccacatcaatactgggacggtctaccaataaatcagcccgagcaagtatctgagaaatagtgaagttagacatcaagtggatgttccgaatcgttcaagtaaacgggattgaatggaaccataacgaacatcggccagtagcccatcccaaccaagcgcaccgcgaccgatcaaaccaatcagagcagccgtattggaacgacggccagcaacagcagacagcgcatcgttcaccaattccggatgacacaccagaaccacatcacaaccagcatcaagatgcgcgtgcacacagccagcaacactaccaacgccacgcacagcagccataccgatgtcatcggaaaaaaccaccccccgaaaccccatgcgcccacgtaaaataacctcgatccaatgcgcagaaaaacctgccggttcaggtgcgacatttggataaaccacatgtgccatcatcactgcatccgcaccggcagcaatgcctgccgcaaacggcaccaaatcctcacactcaagcgtttccaacggacgcacatccactgcaagatcaacgtgtgtatcctccaaaacactaccatgcccaggaaaatgcttaagcgtcactggcataccagcagcatgcatcccctgcacataggcccgggcaaacgcggccaccacgtgcggatcatcactgaaagcacgattgccaatcgcacgattgccacgcccaagatcgatcaccggagcaaaacttaaatccacaccactggctcgaacttcactggccatcaaccaagcatgctcgaacgccaactccaatgccgcctccggatcgcgtgcatacaatgcaccaaccccctgtaatggtggtaacgcgctatagccctcatggaagcgctgcacacgccccccctcctgatcaaccgccaacaacagcggccgcggtgtagcttcacgcagcgcagccgataattcgacaatttgcgcacgtgaagcaaaattacgcttaaacaacacaacaccggccaccgcatcgtcctgcaaccaatccacctcctgagcactgagcgtcgtacccgccacaccaatcagtaacattgcaaaaacctccgatcacaacaccacagagacacaaacacgacattgcaacaaagataaccgcgcgcacatcagacaccatgcccaatagctcccaccaacctgattactagcgcacactgcaaataacacaccgcttaacaaacaactcaccacgacaacaagcaatacgcacgcgcacaacaaaagattcagactgatgcaccccagcaaacaaatggatacgaagccagagccagactgtagtaacgtgcgtcatcagtcacctcgacaccaagccaatccggccacacaaaaccctcatgtgcactgtccaactcaatctcagccaccaccaaaccagcgttatcacctaaaaactcatccacctcccacaggtggcccgcgtaacgcaccaaatgacggcgcttatcaatcaatccccccacacacaacgtaagcaaatcacgcgcatcactcaaaggaattgcatattcgaactcctgccgagtatgaccgaatgccgccgatttaagattgagatacgccgcatcctcttgaatacgcacccgcaccgacgccttttgcgtcccctttcccaatgctttctggtcattgatatacccttgagtcatcggaatcaccctatgcgcagcagcacgccaaccttccccaacaaccaggaatttacgttctatttcgatagccataattttataaaattcagaaaaagtcagagcgaatcagaccacgcaacactcttcggatcactcagcaacgatcaaatacagcaatactctccacgtgcgcagtatgcggaaacatgtccatcgccccaaccgcacgcaacacaaagccctgttcattgacaaggaaatcagcatcacgcgccagagatccaggatgacaactgacataaacgatgcgttcgaacatctttaacggcaactgcttgagtacctcaatcgctccggaacgcggcggatccaacaacaacttatcaaagccctgacgcatccacggcgcatcgcgttgatcacgggtcaaatcagcaacaaaaaattcagcattacccaaaccattacgccgtgcattctccctggcccgctccaccagcccaatatcaccctccactccaaccacctcatccacagtacgcgccaacggcaacgtgaagttacccaaaccacaaaacagatcgagcacacgctccccaaatccagcaccgagcagatccaaagcatgcgcaatcatcttctcattcagccccccattgatttgaatgaaatccagcggacggaacacaaactccacatcccaaggcttcaaccgaaatgccaacaacacctcatcaggccacaacaaacgcacactctccaccccacccgactgcaaaaaaattgcaataccatgctccttgccaaactcaatcagcgccaaacgatccgcctcactcagcggctgcaaatgacgcaccgttaacgccacaacagcatcaccggcaataaactcaatctgcggtacgtcacgcctaccgtccaaactgttaagcaacgttgccaaaagcgcaattttttcaccgacctgcggaaccactgtatgacagaccgacacatcggcaacaaaacgcggatcatgctcccggaaaccaaccagcgtcctcccctttttctccacccaacgtacagaaaaacgccccttacgccgatacccccagctctccgcggccaacgccggcaacacacgctccggactgacacgaccaatacgttccaaactttccaacaacacccgttgcttcgacacaacctgcgcatcttcagccaaatgctgcaatacacaaccagaacagacaccaaaatgcgagcaacgcggtatcacccgttgcggcgatgcctgcaacacctcaacgacacgtgcctcatcaaaatgacgattacgcgcaactggctcaacaatcaccacctcacctggaagcgcaccagtgacgaaagtcaccttatctccctcaccatgaggtcgtgcaaccccacgcccatcatgactgagatcgataatctgcgtttgaaatgacgtacgatcgaaacgattttggcgagccacaaaagaaacactacaaataagattcgaaacattgtcgcagattgcgttccatactgaacccagcccaccatccacatatccatccaaacaaaaaataaagaaccactgttgtacaaataaataaacaagagcagaatttccaagagaattttgcacatacctattgtgagtaatcacgctgacacggaagcagcccgatgaccgaatctccacatcacctgtacccacggctattgctggtagaagacgacccgatcagccgcagattcttacaaacctcactacaaacattgccagctcacgttgattgggccgattcaagtacttcagcactcacactcagtcgccaccaccaccacctatggctgatcgatctcaacctaccggatggcggcggtacagaactactctcatcattacgccgtctacacccaaacacaccggcgctggcacatactgctgaagccaatctgcaactcccccatgacacaggctttctcgccgtcctgcccaaaccgttatcgagcaaacgtctactagaagccgtgcgccacgcactttcacacgcccctgtggaaaatgacccatccccatccatttccacatttccagaccaaaactgggacgaaacggctggattagccgcactgaatggacaacccaaccatctggacgcaatgcgcaaactcttcctggcagaactgccaaacaactgcactgcaatcgagacagcactacaccacaacgacgcacaaacactctgcgcacacctacaccgcctacaagccagctgcggctttgttggagcatcgcgactgagcaatgcagcacgccgactaaaagaaaacccaaactcacaacaagcccgtgcccacttccacgaagccatcaaagacctgctgcactaaaaacaccataacctcgaaaaaaccatacaccgccccgatcaccagcgattatctcctcactgaatatcggctccatctttgataataaaaaacacaactattatttcgatcattacacaccgagtatcaacaccagagacgtaacaaagcaggacaacaacatcttgaaaacgcatacatcaatactgataaataaaaaatcagacaacacgcaaattaattcaccccccttcgccgtaataaacacacaccaaaaaaccgaagcagatcccaactgtagcgtttaaataaacgtcttggctccaacaacaatcggtacaaccattcaccacgtacacgacgtacccataaaggcgcacgccgcacattaccagacataaaatcaaacaacgcaccaacaccaaaaaccaatggtgtatgcaactgcacatcatgatcaagaatccaacgctcctgcacaggattacccaaagcaaccaacaacacatcggcaccgctggcattaattgactcaactaaatcctcaccagccgcaatgaactgcgcatacccatcacaagtaccgaccactaattgccccaactgacacaacgtctgcgccgccatatcggcaacaccaggcttggcaccaagcaagaaaaagcgcaacggacgtggagcgtgctgacatagatacgggatcaaatcagtaccattcagattactaacaaaacgacgaccatgaatgaacagcgcagccaaatccatgcctatcccatcgttgaggatacaaacccgctccgaatacatccgcccccggagcgactggcattgcacgataaaatttgtattagcaaaaaatacccgctgcggtctttcttcagtcaaactacggtacagcgaagcaacaaaggcagacggcgtggttgataacaccggaaacccaccaagcaacagagtatcaatcgtttcaatgaagggtggatcggaagaaatgccagagatcgtcacaacaaagtctccaaaagcccacaccgcagtacgggaaaatcatcaacagtaaagatgactccacacgtttaaacacacctcacaccttctatagagacactaaagttatgcatcaactttcgctccttcaccaccaataatgaaaaataaaactacggatacagatacgctcacaccgcaggtaatatccgggttccctcataggcagtaggatccaaaacacgagcaacaacctcttcccaactcaaatattgacgagactgctgatgcggcgcttgcaacgcacgcttgatcgcagccaccaactcaatagcattccctggagtataaccaaagcgtgtcggataagagccgaccaccgcatgcggacacactgccggtaacccgaaaaagtcgtactgcaacagtttcatcgaactatcggctaaatattctggaacctgctgtgacacatacggcgcaataccgaaagatgcatgcctaatataacgaatagtttcaacgtacttcatctcaccgtaaaccacgacattatcaggataatcaggatgccgccccatccctgaaccgataacatgaaaagtaatatgtggaaactccttccctgcaaccacaaaaaataacggatcaaacaacatcgaaccaaccgatacggcatggatcccaccctcatatggcgatggaccaccaagctcactcaaattttgaagaaccccatggccgatataaaacacattgccatgactaggaatttctttagtcatcgcaggagaaacaacagcgatcacatccaaacttgcagcaacccgctgaaattcacgctcgatataacatgctacattaatcgcactgagactatctgaagcattataaataagacgggcagatggattaatacgcttcgccatatcaatgaacgcaactgcagtaccactctcgaacaaaatgatgtctgcttcgcgtatccactgcaataaaatctccggtggatgctgcacataccagcgaaagagcatatcctcaataccacgcaaccatgatctacgtgtattaaacggatgtaccaacgtacgccatagataacaatgcacaccattatactcaaccacatgattagcatactcatccaacgggacacgcaaatctttttttagcctggacaacaaactgtaacgtaatgagaaaaaacgagtatcaccacgcttagccaattcatccgtaatgaaatgaatactggcacgacgtggtgtacgataatcatgcgctgacaaaaccagataattgggacgcactccaacggacatcgtagaaacatttgcatcgtggcttaataccgcacttgtagaagcattcataagctcgctcgttattcactgaattaacgtattccattaattttcaaaaaaatcctaagaaccgatgaattaagatcccttcctcactctcctcatgatccttagaagaaaagaagatactactgaagaagacataccgatcttaatgatagacagcacatcacgacgaaatgctgaccataacaaggataacactgcaaaagctaccaacattgccaaagcaccaactatcaattgcttccaaagattcgactcgtcacaccactgcgaagcatacatagaagcgaatgcacacaccccgtaacctacgatcgcacgcatcccattgaaaaacatttcccaaccaggaacaggtgtaatacgcgccgcccaaataatcgacaatggccatatcaaagctaaactaatgctgtaaccaatagcgacaccaaatacaccccaataagcaccaatgcacacacacaacaccaaaaacacatgactgacaatagaaaataaaagatgatcgcgtatcaaaccgcgtgctaaaaatagccaataacttgcataactcgcactctgcgtcataccagccaatgtcagaatttggaataacaacaccgccgaacgccacttttcaccaaggaccaatacaattaatggagtggcctgcgcacaagaaaatgcaaacaacgcaacaatcacatgcaacatcatcgtttgcccacgcaataagaagctatcgaaacgagcacgatcatcttgcaactgagaaagcaccggcaacgccactgaacttgccggtgcaatcacctgattcaatggcatcatcaacaactggaatgcacggttatacaaaccaagtacattaggaccaagccgataaccgataatcacttgaccaacactgcgattggcatagcttagcaattgcgcaaccatcagattccaaccaaaactgagaaaactccccatcggcacaccacggcgataaccacctggcagccaacgcgcacagaccattgcaattaccagattcgccacagcttgcaccacctgctgcaacaccaacgcccaaacgccccatccgaccagcgccacactaacaccaactaacagacctaacacctgcgcaccaatatcactcaatgcaagctgaccgaaacgcatctcacggctaagattggcgcgatactgagttgccatcccattaagtaaaaaattaatcgccaatacctgcgtaatcgtcactaatgcaggttcacgataaaaatcagcaattagctgtgccgcaacgaataccaccaacgacagtgccaatccgatcacactattaatccagaatagattatcgcgctgcgcgtttgtaatctgcttggcctggatcgccgccgaagaaaggccaaaatcacgaagaatatcagcaacacccacaatcgcagtgaccatcgccatcagaccataatcatgcggattcaacaaccgcgccaatagcacgataatggaaaattggataactaccctcgccccctgcccaagcatcgtcaccacggcaccgccaagcgcacgtgaagccaaactacgctcggacaccgcagaaacactcaccacactgtcactcatatcatcaccttatccctgtgccacagcacctgaactaaacacgacatcggcaacatccattcaatgtaactgaggcatagcatccacaatgccccaagcatatagtgcaacaacgcattaatccgcctggattgactatcgatattcccaagattcttacagaaattcacaatccaaaaattggtaacgacacatacatcaatcatccgatttagctgcatactcaacagaccgcgatacctgcgtaatattttatgcattaagaaatcatgcacctgtgaaaaaaaatttattcgccaccaatagtgctccactgaaaaaaacctattcaatcgcttcgacatactggaaacaacccaaaacaaaaagacaccattcacctcagaaattcctgctcgccacctaatccaagcgctctacaatattcatcctgataacaaccaatgacataacgccagtgataacgatcactgaaagccatcgcttgagatcgccagtcgataaaatgagtatctacctgtactgccaatccctgtacagcaactgcagcctgctgtggttgtaatggatcgaccaaaacacctaaaccggactcacgatgtagacgcgcaaatggtggaatatcactcaagacaggaattaatccagcactcatcgcctcaactgcagcgataccaaaaccctcatgccgcgacagtgaaataaaaaactgtgcttgctccattaaaaagcgcaactgcgactgtgacggactacaatgaaaatgcacctgctcagacaacccaagcctatccacctcatacgccaacgcagcctgatcataatcatattcacgtccagcaataattaatcgccagcgtggatctaacacatacaatacagcgagtaattgcaacgtctccaacaatcccttgttcatcgaccagcgcccgaaatacaaaagagtgcgtccagcttccgaagcaccacaccttgcatacttctccacatctacgccattttcaatgactcgcaatcgactcggtgccacgatctttgaaaacaacgcaccatcactctcactactcgcaataatccttgcataagccaacgctgataacctagtcaacgtattgaaccaaagtaatttaagtcttgatgcataatccgtatggaagaaaccaccgtgcgttgaaacgaccattggctttccatgtaacacccgagtcaatgccagaaagtcataaaaaaaatcaataccgtgcacatgaatcacatcggctttatccaacatacgcaatacccatggtgccaatggataacgcgaagaaccacgataaccaatgcgctggatcgacacaccctgatacttatcagtacatggaagtagaacatcagactgagtaaatactcggttcaacgtcacgacatcaacatcgattccagcatgcaaatgcagctgcatcgcaatattgaagaccacatcctccatcccaccaattgacggatgaaattgacgaacaacatgcaccactttcattaaacagtgctcccattccattcaaaattacaaagattcgaatgatccccactgaatgcaacaagtcataattttttgataaatcaaaaaattatggttccaaggataagaacatcattttcaataacacaacaacatccttagccataacggattcgactttggtatgaaactccctagaacaaatcaccaacctattattaatgaataaaaaagacattccttaaaaataataaaatatctaaatacctattatacctataacataaaaaaacaaatgcactgctcatcgaaaatacgaaaaaccatgccgccacagcggattattaaaatccaacacaacataaaaacaccacatcacctaaaagcgacactaattagagatccatcacatccagataaaactcacatcatgatgaacgcgatcgcatatatgaacatgcacccagtgaccaaggtatccacctcatcaatatccatctaaaaattggaataaaacacaacgtaattgctgaaaaaagcaatgccaagatcaatccagatgtccctccgagcaaagacaatactccgaataacacaaaaaaaactagcgtatgcgtgcacaaaatcaacagcgtattacgcccagcccattgtaccaatgaccattgctcaacaagagccgccgcacataacactatcgccacacctaacaatgcggaaacatgaaaaacaaatggtgaattgccaaaaataagcatattcatatcaactttttcattgcacaacgccaacagaaaccaaggaaacaacaacacggcaagtaaaatcatattcgcttttcttgttttcgggagcaaccgtaaccaagacgttctgcgtcccatcactccaaaaacgaaaaataaaaatgcaataggcaattcatctaaagcaaatgggaaacgcacaccaaacccaggaaaaaaccctacccatacccaagaaaatatcccaccaaacaacaccaatcgttctaaagaaacatacttagacaacatttgataggttaatttcgtcacaaacaatgctggaagaaaccacaacgacggatgaacatacaaagcagttcctccccccatcaacaaaccattcaacggctcccaccaagggtgcatcccccaacgcaaatccttcgcaccaatatgacgggtaagcaaccaatagatataaccaacgaaaaaaaagaatacatatggaaccagtaaggtacgcatcaaatgcaacaaacattcgcagaatccagactgacgcatattcgtgccagcagcccaaccagataacagaaaaaacaacggcacgtggaaactgtaaatcagcacaacccaccattctggaagccctttagcatgaccaagtactaccagaaaaatacctagtcccttcgccgcatcaatacgtgcatcacgcccaactgataaagatcccggagagtgtgctaatgtccctcctcgtactggcacatactttttttcatgaatcacgacacacctccttgtgctatcactctcgcttctacaagattcttttttgcagccaataccttaggcgagcaattccaaagacagccacacgtaaaccaccacaacgcagacgttttaatcgaaaaataactatttgataccaaaagactcaatgcaaatgcgaatatggccatgtttttaaatccccgcccctcatgactttgcatgtcgaaaagaaatgaataagccaacaaaaaaacaagtacagtgataactgactgtgacgcgatgaaataagcaataccactatcaaaataacgataggacgactgaacatccaagccaaaccacgaatccaagggcaagtgagccagtgaatacacactgaaaaaagtcctgctcagaatcgtatccttgtcatatgcatgaataccattcacctgaactatgaaccatccaccgagtaacaccgaaaaaaataacaaaaacgcaaaacgctgatcaaaacgtttaagaaatggtgcaagcaataccattaatatgcatgtaccagtcgccaaacggccatctgaagcgacaattaaaaataagatcattgcgatcgataaaattaactcggaaacactcatccaacgccagaaaaccaacacaattgcagcaaaaaagataatgtaatttcccatcgtcaccggttcaatgaacacagaagatgcacgtggtaaattcgaaccagcaaagaagttacgctcatccggacgcgtggcactaagatacaaactactcccttcattccagaaaccgtctgcgctagcaccacgagaattcacgaaataacttttcggattggcaatgtcaccataaacatcaggcatcatcaactcgaaaacagcaacaaaagtaataaaaatactcatgcccatgaatagacgcagcaaagatccacggtaggctgcaccgagtatcagaaaagcgaatggaatcagcgcatccctgaagaattttggatcaaaatccaaactcatcagaaaccgtagcaacgtcaatgcaacgagaaacccaagaccactcatcacaagcacaacgcgcttgcgatccaatgcagataatccgagtatgaagcaggcaaaataaattaccaactccactgcataagtcatcactggagtcaccgtaaaaactttggcgttaatcatggctaacggaaagttataagccactccaaaaaacagcactattccaacaagaagattccgtgaatgctctttggtgatctttctcatacgcatcagcatggaaactctcctgacacagccatgcatggactgaaacatctaagatcaataagcatttttctgaccaagtacacgtactaaagtcaaaacaataattcgaaaatcgaaccacaatgaccagcgccggatgtaatcaagatcgtactgaatacgctttttcattgtccttaattcttgtgtttcaccacgaaaaccgttgacctgcgcccacccagtaatccctggtttgacgtaatggcgttgcatgtaatgctggatcaatttctcgtaataactgttgtgctgcgccgcatgaggacgcgggccaacaatcgacatactgccgccaagtacattgaagatttgtggtaactcatccagactggtgcgacgcaggaacgcaccaaaagcagtgatacgactgtcattacgactggcttgcttcagatgctgactttgatcgtcatgcacccgcatcgaacgaaatttgagcacataaaactcacgcccattcaagccatggcggcgttgccggaacaataccggacctggggaactgaacttgataccaatcccaatgatgattaacaacggccacagcaacagcaatgcaatcatggccagcactttatcctggattgtcttggcaacaaaaaagtagttatctcgatcaacaccgccctgacgaagattaatgacaggcacatgaccaatttgttcacccgactgattgagtgtgccaaagtcgaataaatcaggaataagttttacattgatcggataacgctccaatttcttcaacaacgtcttaatataatcacgctcaccaagaggcatcgaaatccatacttgctcaacgtgatttttttctaaaaaatcgaacaatctatccggcgtcccaagagacggaagacgcctcacatattcagatacagagacatcgtaggaagtactgaaatacccaatcaattgcatccctgtccatgtattacgattcagataatggtgaattttcatcacaggatgacgcagcccaaccacaacaatacgttggacatccacaccacgcatatgcaaccagttgagtagactacgaagcgctacacgcgcactcaacaaggtagagagcgcaccaaggaaccagaaagtaatccataaccaggagacaggatgtcccaattgaacaatcagtgtatgcaacgaaaacaagataaatacaccacagaacgcactactaagtactaacagctcccgcgccagagcacgcccacgccaactgcgatacaacgggaaaaaagaaaaacaaatcaccgaatacagtaacgtgttaccaatcgcaatacgatatgggaccattaacatccaagtaccaaacaacaatctgtaaatcattacaccagagagcaccaccattgttagatcaaaaacacgaagtattagatcagcggcagcagaatatttcgacaataaccgcggtgaagaagcaatatcagtaacactgttcagatctgccagaagcattgatagaactcctcacatatcctgggcagcgcatattgtgggaggaacaagcgcgcaccaccagacaacgttggtttcgttcaccagcatttgccaccatgcatcaatccctaacaaacgccggcactttacttaaaaggaatctgaccaccaagcatcagaactaaatcaatgaaaaccgcctgctacacttcactcaatacaactgcctttattccacgctcatcacgtttatccgcttcgctccatgcatggaataacgcaccatcgcaaccgtcaaacccaaaaagacaccaaaaattccacccaatatcgtgttcattaacaaattcggcgaaattgggcggctcggaatatctgccgcatccactaccgtcacattgttactaccaacatcgccaagcacactaatttccttataacgttgcaacaacgcatcataaagttggcgatctgtttcagcctcacgctcgagtaggttataacgaataagacgcgttttcagatccaactcatccttctccaacactgcaatacggtcattcaatagattctcctgacgtaatgtagcttcatactgagacttcaacgattgcctaatattcaatacctcagcattgatttgcttagtattttctttgattcttgctttcaaccgttgcatctccggatactcaggtttaaacatggataatttctgctgatattcattgaccatattcgcctgctcggtacgcaaagactgtaccaacaggttagacaacacttgagggatactcagaccatcaccaatactggcctgacgccaagaggcttcggccctaatccgctcattctgtgcggaggccagcaacgcattaagatcactcaggttctgtgcagagagtgatggtttttcgtcacccacagaaacaatcttttcatcagtggaatacgcaaccacattcctttctgacttatccaccttgatacgcaattgttctaagcgtccagcaagatacttcattgcaaatgagaaggcatttgaacgacgctgctgattattttcaatgaacatcttggcgtaggcattagcaaccttcgccgataaggtgggatcatgagaatcaaaatgcacatagaccagcctcgaattgaggatcggttcgatctttaaactgttcaacatcatttctatcaatgcactctcgatagctgtgttacgagtattaactggaagattttgtacctttgacaatactttatcgacgagtggtttcaacatcggctctcgatccaagttcatcttacgaatgactgcacgcgctaacgaacgactctgtaataactgatattgagtttgatagaaatcacgatcaagcggcgactctacagggatcaaattatcgacattcatcaccttaggcacatcacgctcaatctgtaacgtggcagtggcacgaaacttttgaggaagcagcaacgagacaccaagggctagcgaagttgcgccgatggcaacaccaataatcagccaatattgactgaccaacacacgtaaataatcaagaagattcagacccaatggttctgaggagtgaaacaaagcggaagaagtttgattgggataatccatagttatcgatacgcgcgccagaccataacgaagggggtaatttcaacaagagtgcgcaaaaacaagcgcatgtcggaacggtaaacaacaacgagatcaccaggatagatctcaggatcaggatccttaccacgctcgatacgtgccaaatcaaagcgcgccaacatcttctgtcctttgacagtacggaatacaaccacgttttgaagactcgccagcgtgtttatacctttagcctgagcaatcacttgctgcaatgtcaggttgctaccgatcaatggatagctccccggctcggtcactgcaccagtcacggtaacacggcgtgcattcgcttcttggataaaaacagaaacttgaggattttgcagatagccactgcggtaacgattggctatcagagtttccaactcagccgcacctttattggatacatcaatgcttcctaacaatggcagggtaatacgcccagtgttgtccacacggacctgacgctccagatcatcgacttggaataccttgatcaacaataagtcaccaggagaaactttgtattcaggctgcacttgtggaaacagcagtgcatcaggtaccgggagagaagaggccagagaatgcggtgcagtattgcaagccatcagaataaccgtacacattaaggacaaactcactagtcccgttaatttcatacgcgatgacatgaacctcttgtagggaaaaatcgagtaatggctcgccatatcgtcccgatgcaaatagaaacggataaaaaattgaaacaattcgccaaacacattttgcataaagtatcgagatacaacttttaactatttctaactatcgcataggagatgcgcagtgcaatctttattgaactattttttgggagattcttgacggagttggctcaatgaatagatttttataggcactcaaaacttgaggttgcctcctaatacaccgccactctgaattgcatcttttttgatgctcgactcatcagggaaccatgcaacaaacatgcccccacataaagaaatatcagggaatctgataacccgatgaggatatacaactcatattgcatcggcatgagtgcatgaattcgagcaacatcaattacagactgtgaaataaatagcaatacacgcctttctcaatgagaaagatcgcaacaatcacggcattcagcaactaaacatcatactttctgaaacacacatataaaaaagcgtgctttaatataaaaattattgatgccataacttaagcaatcggcattgggctacagcaatattgcatgtagcccatagaagaaaactagcgtttatcaaaccacactgattaatacgacttagagcgctgcgaccactgcatctcccattgctacagttcctaccttggtcatcccttcggaccagatatcggctgtacgcaaaccactatcaaggacgacaccaaccgcatgttcaatcgcatccgctgttttgatatgccccatgctataacgcaataacatcgccactgacaaaatcgtcgctaatggattcgcgaccccttgtcctgcaatatcgggcgccgaaccatgacacggctcgtacatccctttgttattggcgtccaacgacgcagacggcaacataccaatcgaaccggttaacattgacgcctgatccgaaagaatgtcaccaaacatattttcagtgacaatcacatcaaactgttttggatgacgcactaattgcattgctgcgttatccacatacatatgcgagagggtcacatctggataatctttagccatttctcccgccactgtgcgccataactgactggaagcaagcacatttgctttgtccacagagcagagttttttaccacgcagacgcgccatttcaaaaccaaccttgagaatacgacggatttcactctcgcaatacggcaacgtatcaaacgcttcacgctcaccattttttgatatacggctgccgcgtggctgtccaaaataaaggccacctgtcagttcacgcacgatgagaatatcgagtccggcaacaacttcaggtttaagggtggatgcatctgccaattgcgggtacaacaaagcaggacgcagattggcgaacagccctaattgagcacgaatcttcagcaacccccgctctggacgaagtgccggatcaatcgtatcccactgtggtccaccgaccgcaccaagcaacactgcatccgcatcacgtgcgcgcgccaaggtttcgtcagccagtggacttccatatttttcataagcagccccaccaagtgcgtcgaaactcaatctcagattcagcgtatgacggacattgacatgctctaacactttaacggcttcagcaacgatttcatgtccaatgccatcgccggggagaatcaaaatttgcttactcattctggatgatgtcctatgtattaaataaggcagcagctctgctaggcatgttgctcataagatgttgagaaagggtaaaaaggcgcacgatacattttaaggattcgtgtactaagaaacgtactttgcaatcaaacaacaatctaatctctggaaaaaggcttttacggatggtagataccctgtacacactgtcataccagctgcgcctaataccctacctcacagtgcactgaatgaacggcactcattagttgtgctacgcgaaacgattcaccggtcgcaacatcggcatcagtattagcaaatggcaagtacctaaatgcatcctgaaccatatgcgtattgcgaaaatagtttaggtaacctctttgctgtgtacgacaacacatcgcaaccaccacatcacatatcgacaaggcaaatgcagcacgaacgtaaccatcactcaaattgcacgcacggtgaccacactcgtgaacgggacactcaccgtaatctcgcagatacgctgagcaacacgcacgcagctccacagaaataaattactgccttgtgtagagtcacattgatcaatcaggattcagtgtaacggcgcaaacaaccacggttggcgtatacgatgcgcggcctcaaaaacgcggatggcctcagcatgctgtaaagtgagaccgatatcatccaggccgttaagtagacaatgcttacgaaacgtgtcgatctggaaggcgtaagtagtaccgtcctgggtaatcacttgctgtgccgccaaatccacagttagcgtatatccctcagtcacttgacactgtgcaaacagtgcatccacttcaaccttattcaacacaagcggcaataaaccatttttaaagctgttgttgaaaaaaatgtcagcaaagctcggcgcgattactgtgcggaagccatattcatcaagcgcccaggcagcatgttcacgggaggaaccacaaccaaaattgtcgcgcgccagcaacacactcgcaccacgataacggggaaaattgagcacaaaatctgaattaatgggacgcttgctattgtcttgtccaggttgaccggcatccaaatagcgccattcgtcgaacagattagggccgaaacctgtccgcttgatcgactttaaaaattgcttgggaataatctgatcggtatcgacattcacgcgatcaagtggacagaccaagccggtgtgttgggtaaagggtttcatcaggcatcaccagtgcttaaatattctatgtacgctgcgatcatagatcgcagaaccgttttattacgctgctggaatcgaaagaaataaccgtttagagacactttaaggatgagctagaagtattgaaacaatcaaaaaacggcattgaatataaaccttcattaacacgttatttccaagcatctacaaagacaacataaggttcatcaccgcatcatttcgcggacatcgacaaagtgaccagccacggccgcagcagctgccatcgcagggctgactaaatgggtacgaccaccgatgccctggcgcccctcgaagttacgattagaagtagatgcgcaatgctcgccactgcccaatttatcgggattcatcgccaaacacatcgaacatccaggttcacgccactcgaaaccagcctcaatgaatatcttgtccaagccctcaacttcagcctgtgcctttaccaatcccgagccaggcacgaccatcgcctgcttcaccgtggaagcaactttacggcctttaactacttccgcagcagcacgtaagtcttcaatacgggaattcgtacaggagccaataaatacacggtccagctttattgaagtgatcggatcattcggctgcaaacccatatatttcagggcacgaatcaaagactccttcttgactggatcagtttcgcgctctgggtctggcaccgattgatccactgccgacaccatctctggcgaggtcccccaagtgacctgaggtttaatctcttcagcagataactcaaccacacgatcaaagtgcgcatctggatcggaaaccaaaccacgccagaatgcaacagcagcatcccaatcggatcctttaggtgcaaacgggcggccatgcacatactggatggtcttctcgtccaccgccaccatacccacgcgcgcaccagcctcaatagccatattacaaatggtcatgcgcccttccatcgacaacgcgcggatggtactcccggaaaactccaccgcataaccgttgcctccggccgtgcctatcttcccaatcaacgccaatacgatatctttggccgtcaccccccatggcaaggtgccttccacacgcacttgcatatttttcatcttctgggtgactaagcactgcgtggctaacacgtgctcaacttcagaggtaccaatgccatgcgccaacgcaccaaaggcaccgtgtgtggaggtgtgtgaatcaccgcacactactgtcataccaggcaaggtggctccctgttctggaccgatcacgtggacgatcccttgacgcacatcattcatcttgaattcgaagataccgaaatcgtcgcaattttcatccaacgtctgtacctgcaaacgcgaaaccgtatcggcaatcgatagcaaactgccttgacgctccgccttggtcgtcgggacattatgatccggagtcgcaatattggcattgacccgccacaacggccgtccagctaaacgcaacccttcaaaagcctgtggtgaagtcacttcgtgaagtatatggcgatcaatgtaaatgagcgaagacccatcgtcgcgacgggccacctcatgaatgtcccacaatttgctatacagagtcttaccggccatagcagcaattcctaatgtggttacaacaatcggcgactgatatcacccttcgttggcaaccatactagagcgagcttatcaagatcaatcatgggaattcagcattttcaaatgtgagaattattggatgatttcgtgtggaatctccacgtgcgcaccatgtcatcccatacgccaaaaatatagagtgtcgaacactcggcacttagcctcggcataaacccatgtgcgattcatctggagactcccaacaagtaggccagtccacaaagaaatcatgagactcaatgagctcaagatagcaatcacaccgatctcgctattaactgtatcttctgcatcgcggccaacaaacaccgccagatcctcgagactgctgacactctaaagaaggtttatggatcgacagaatcacactttctaaaaataaagcccggtcacacaccccatccaaggtaacactgcaacagcagtcaggctgtgccaatgaaagtcaacacatcacattggtaaggaggaagcttgataaggaaacagaaatatttcctgtaatgaatgcaaaaaaatcacactatctttatgaagtgacgctgcacaatggctaagcataaaacttaagataaaatcgatctaaaaaagatgcggcagtcctccatgaccgccgcggcatgcggcgcgcaaaaagcgcagccagcaccggacgggagcagaccatccgtaataaaaaaacgactcccaaatgactctccaggtaggctttgcacccattcaagcaaggttacctacaccctaatatgaccccctggaacagggctgtcgaaagagtaacagggacgttaaaaacatgtgataccagaaatgatgaattgcgatacacatcacgccacgcatatacagcatcttcacgttgaggccacgcgttgcacgatttcaacgcaacatgaatgagcatcacaatctgggcaccacttaattaagttgaattctgaaatggaaaacgattaataggacttcgccgcagaaccaatcgaaccgtggcgaaaatcagcattaacccggggaatgacaagttttcggaaatctaattcaaaccattcgaagaacaaataatcatgcagatcgtccacttgctgtatcgcgctgacacaaaaatggaaactaaataacaaagattaagtggctattttcacaacccgatatttattaatgtgtgtgcattacaatgcaatattgccaacatgtcagtgtcaagctaacgatcaccgcagcgtagataccaatgtccatgacctcacattgaccgattggatgacacaacgcaccgtggaaactgcctactacgtcaagaacaaaaaagccaagctctacagctgtatctcagaaaatcacaatgtcatccccccaacgacctaagcaacatcttggtgttgacagtgctgttctaccttccaaaaacactacgctgcgtaatagcattttggtgttgggcatgttgctctacatcttggccaagaagcaatggaatggcatcaaactatcaaaacgctgtaacatctggagtggcgtcatgaatacaatcctcaagcaactacttaccggcaaggataaccagacgcatgacttagtgcgctggctgggtaccattgtcgtctttacagcactgacgctaaccatctacagcgtcgtctggcgtggccaagccttcgaaccccaagcattctgcttcggcatgagctccatcttcgccactcttggcgctgcattgaaactcaaagaaacgactgagccatacaattaccctgaaagcaacggcagcaatgcttccaaagcgactgactatcaagacgcgcatgatcctatgagcaagacataaaaccgcaacaacgatgacgacctaattccagcgttccatcccgtgcttggcgtgtatcgtattactacgtgtgtaaggcatcggcagccacccaggctgccgtttctctcgccagcgtccctcttggatagtcaagaaggatcatgcaaacacagacaggccaatggaacgtaatcacctgtcttattgaaaacgtatcaaaaccgtatggcctgctttatcctccaggctcacggaaaacagctttcctagcagaatcaccactgcaccgctcaccatttgatgcttgcaacatcaggaacgtacctccacaacatgtctaaccgcttggaaagattttcgagtcgctcctaaaacgcaatgtcatcaaagacgcgaactatcatgctgtgaaatcaaacgcatcaaaagcgatctaaaacacttcctaaagcacagcacgctaaatacggatcgtcctgcaaagatcaccttaacgtacaaggttgcaacgaccatctaagactgtggcgatcacatcccagcaagctgcaacgctgcacagcttctgaaaatttctagcgcatcaaagaacaacacaggcttaaatacagggagacaccgtgtgcatcacctttactccattttgctagcaaaatggcactgccgcacgctcacttcttcaagccctgagcacaacaccacattcacagcaacaacgcactattgacgcggatcacgaaagaccgagatcggccatgccatctccgacgtggtacgcagaggattaatatccaggccaccgcggcgggtataacgtgcctctacagcgaggcattgcggggagcatcgctgtaacacatcctgaaaaatacgctccacgcattgctcatgaaattcagcatgatgacgaaaactgatgaagtaacgtaacaagccctcatgatcaatcggcacaccaaagtaacgcaccgtcacgctggcccagtctggttgaccagtcactgggcaattagacttgaataaggtcgaagttagagtttcttcaaccatttcttcaatcaaattctgagcaacgttggacaaataatcgggattcggtggaccgtagtcctcaatgtccacattcaacctatcaagtgatatttccttgtcccctcccccaaccggcggcaacccaaattcaaccgcaactgccgcaccagcgcacgccgacagatcagcggcgatgcgtaggcgcagcgcctcagcacgattaaacacctcagcactgaacgaattgagatagagtttgagcgacttggattcaatcaaatagggcgagtcacatggcacatgaaacgtcgctgtagccacgcatggcttaccgcgtgcatccaaccaactcagctcataagcatgccagcgatcctcaccaacgaatggcaacaccacaccgataccgatttgagcacgccctacagcacgggaaattgggaaaagtaacgacggatcgtaagctttcgggtagggaaccgcatgtccaagaacagaatagtgagaggtgttcatacctggattctagaagctgctgtgaagattgaagaggactatatttagggtcgaaatatcaaaactatgcacacctctccaattcatattccgttcaccagctcctgaaaatgctatagcatggcgtcaacctgaggatatagggatgccgaacacaccaactgtctctacggcatccaggattgagtaatgccatattttttaaaaatatccctgcttgccgcagcactcatgaccgcggcatgcagccaacgcgacaagagtagtgcacatgctgctggcgctgacaacacacaaaacgttgagaaacaggggaataccgctccaattcctgtcacagtagtcgcagcaagcagccaaaatgttcctgtgtacgctgccgccccaggcacagtggccgcactgaataccgtcacgattaacccgcaagtcagtggtcaattgatcagcctacacttccgcgagggtgagtcagtaaaaaaaggccaattgctcgccgaaattgacgcacgcgcacttcaggccagctacgatcaagccgcagcggcgaagcgtcagaaccaagcactgctggccaccgcacgtgccaactacacccgctccagcacgttggaataccaaccgtacgttgccaagacagaattagatacacaacataaccaggtcactcagtatgaagcggcagtcgcagcaaacgaagccgcaatgcgagcagcccaagtacagctgcaatacaccaagattgtcgcaccgatcgacggcgtcgccgggatccgcggcgtagatgctgggaatgtggtcacaactagcacctccatcgtgacactgacacagatgcatccaatctacgtctcattcaatcttcccgagcgcttgttgcaggaagtacgccaagcccatgcctttggacccgtgatggtggccgcgctggaccgcggcgatgcacacccactgaccgaagatggcacattggatgcgatcaataaccaaatcaatcctgacagcggcactttcagcgcacgcgccgtgttctccaaccgcaataacacactatggcctggccagttcgtcaacacgcgtctgcaactacgcacgattgccaatggtgtcgtaattccggcgcaagcggtgcaacgcggtccgaatggcgactacgtttaccttgtcaaaccagatcacacggtcgctacacgggaagtcacccaaggcgtggaaatcgatgacagccatgtacaaatcgccaaaggcttgaatgtcggcgacatagtggtcacagaaggtcaattccggctcaaaccaggcagtaaagtcatcgcgctagcatcaggtgaaactccaccagcaccaaccgaagccgaattgaaggctgctgcggaaaaacgcagcaaaaatagcatgggtggtcctcctcgcggcggcccataattccgacgttgttcattctgtaacccgttttctccaactgacgttatttgtcaaggacacaccacgtgggcttttcgacgatctttatccgccgcccaatcgccacttcactgctgatgttcggcgtactcctacttgggatcctgggctacaagaaattaccgatgtcggcactccctgaggtcgatgcacctagcctggtcgtcaccacccagtatccgggtgccaacgccaagacaatggccgcactggtgaccaccccattagaacatcagctcgggcagatttctggcttggacatcatgagttctgattcctctgccggcttatcaacgatcaccctgcaattctcaacacacaaaaatctcgacatcgccgcacaagacgtacaagcagcgatccatcaagccatactgccctcagcattacctcaccagccgatctacaaccgggtgaatccagctgatgcggccatcatcaccctcaaactcacctctgatactctgccactacgcgaactcaatacatacgcagacgctatcttggcgcaacgcctctcacaaatatcaggcgtcggcctggtctcgattgctggcaacgtccgaccagcggtgcggatccaagtgaatccggcgcagctatccaacatgggcctgaccatggagtcgctgcgcaatacgctaacccaggccaacgtcaacgcacctaaaggctcgctcaatggcaagagccagtcttacagcatcggtaccaacgatcagctgaaagatgcttcgcaatatcgggacaccatcatccattaccaaaatggacatccggtccgcctctcagaggtcgccgatgtggtggacggcgtcgaaaatgaccagatctccgcttgggccaacgcaaaaccagccgtgctactggagattcgccgccagcccggtgccaacattattcagaccgtcgaacaaatccgcgcgatcctgccgcagttgcgtgcggtgctgcccactgatgtacatcttgacgtcttttccgaccgcaccgaaaccatccgcgcttccgtgcatgaagtgaaattcaccctgctactgaccattggtctggtggtcgcggtgatatttgtattcctgcgccgactatgggccacactcattccatcggtagcggtccccctatcactggccggcaccttcagcgtgatggcatttaacgggatgtcactagacaacctctccctgatggcactggtcgtcgccaccggctttgtcgttgatgacgcgattgtgatgatcgaaaacatcgtccgctacattgaacaaggcaagagcggacgcgaagcggcggagattggagcacgtcaaattggtttcaccatactctcgctcaccatttcgctggtcgccgtgtttctccccctgctgttgatgcctggcgtcaccggtcgactgttccacgagttcgcctgggtcctgtcgaccgccgtcgtcatctcgatgctggtatcactgaccctgacaccgatgatgtgtgcctacctactcaaacccgatactctgcccgaaagtgatagcccaacaccaagcaccaagatcaccctgtggacacgcactgtcgcactatacgaacgcaccttagactgggtgctgatgcaccaacaactgaccttagttgtagcgctagtgacagtagcactcaccatcgtgctgtatgtaacgatccccaaggggctactgccagaacaagacactggactcatcattggcgttgtgcaagccgaccaggacatcgcattctcacagatggaacagcgtacccgggccgtggccgatgcactgcgcaaggaccccgccgtgacaggcgtctccgcatttatcggtgccggcaccatcaaccccacactcaatcatggccaactgtcgatcgttctcaagccacgcaaccaacgtgaggggctgaacaccatacgcccacgactgcaacgcgccgcagccggcatcccaggcatcgtcctctatctaaagccggtacaggatgtgactctggatacccacgtcgctgcaaccgaataccaatactcactctcgaacgtcgacgcaacggaactggctacctgggccacacgcatgaccgaggcgatgcgccagattccggcactgaccgacgtagacaacaacttggccgaccaaggccgtgccttacagatcactgttgatcgtgataaagccagcctccttggcgtaccgatgcagacgatcaacgacaccctatatgacgcattcggccagcgccaaatctccacgattttcaccgaactcaaccaatatcgggtcgtcctggaagtggccccacacttccgcaccagcaccgcactgacgcagcaactgggagtcgccagcaacggcagcggcgcactgactggcagcaatgccacgagcttcggccaagccgtctcatcaaattcctccacagccacaggtattggcaaccggaacaccggaatgaccgtcggtactggccgtatcatcccgctgtcagcccttgccgatgctaaggtcaccaacgcccctcgcgttatcagccatcagcagcaacttcccgccgtaacgatctcattcaacctggcccaggggtattccctctcccatgccgtgaaagccatcgaacaggcacgtacccaactacagatacctccccaggtacgcgtccagttcatcggtaaagccgtcgaattcaccagtagccagagtgacatcgtgtggttgctgctcgcttcgattgtggtgatctacatcgtgctgggggtgctatacgaaagttatatccatccgctgacgatcatctccaccctaccgtcggcaggcgttggcgcattgctggcactgatgctctgcggactgagcctatcggtggatagtattgtcggcatcgtactgctgattggtatcgtcaagaaaaacgcaatcatgatgattgacttcgccatcgaagcacgcagcaccgggagcagcgcccacgatgcgatccgccgcgcctgtctgttgcgcttccgtccgatcatcatgaccactgccgccgcactgctcggcgcattaccgctggcactgggcgacggcatcggcgcagagttgcgccgtccactgggcattactattgtcggtggcttgctgctatcgcagttgatcacactgtacaccacgcctgtcatctacctgttcttcgaacggttatccgagcgcctacgcctctggcgcgcacaccgcacctcggtccaagccacaccacagcgcgtatgaatcaccctcccccccacctgctggcagctactgccagtacatcaacgtgtgcaagccggacgcatcccttcggcttctgggagccaaccttatgaatctctctgccgggtttatcaaacgtccaatcggcacttcattgttggccatcggcgtgtttgtcctcggcctgatctgctacctacagctgagcgtcgcgccattgccgaagtttcagatcccagtgattgctgtcaaagccaaccaacccggcgctaacgccagcacaatggccaccacagttaccgccccgttagaacgttatcttgggcaaattcccggcatcaaaggcatgcgctcttccagctcggagaacaacagcaacatctttttgttgttccaaagcaaccgcaatatcgactcagccgcccaagacgtccaagccgcgatcaacgcagcgcaagcggatctgccctccggactgctcactccctcatacgaaaaagccaatccaaacgacgacccggtcatcgccctggcgctcacctccgatacccagtcaatggatgccctctacaacgtggcagactcgctgctagcacagtatctgcgccagattcaggggatcagctccgtagatatcgtcggcgcatcgaccccagcgatacgcgtggatgtcgatatgcaggcactcaacgccctgggcttgacaatggaccaattgcagaatgccgtgcgggccgccaatgtcacctcccccacaggatttctttctaacgacaccagaacaaccgaaatcctgctcaacagtacgatctccaaagccgccgacttcgcccacctagtgatcgcaacccaacctaacgggcgtatcgtccgcctgagcgatatcgcccaggtttacgacggccagcaagacgcctaccaggcagcctggttcaatcacaaacgggccgtggtgatgtacgttttccttcgtaccggagccaacgttgttgaaaccgtagaccgggtaaaagctgagctacctgcattacgtacctatctgccatccgggacggtaataacaccttacttcgaccataccccaacgatccgtgcctcactgtacgaaatccaaaccaccctgctcatcagcttggcgatggtgatgctcaccatggcactgtttttacgccgattggcgcccaccgtcatcgctgcggcgacagttcctttatcgctggctggcggggccatcgtcatgtatgcattagatttcaccctaaataacgtgactctcctagcacttgtcatcgcgattggcttcgtagttgacgatgcgatcgtgatgatcgaaaacatctcgcgccacctcaatactggcatgtcgcccctggaagccgcactcaccggcgcacgcgagatcggctccaccattgtctcgatcaccgtgtcattggtggtggtgttcgctccctttctgttcgatcacggcatgatcggcacattattccgtgaattcggaatcaccctggtcgctgcgatcattatctcaatgctggtctcactgacactgactccggcactctgcagctgcttcctgtccgcgcatgtcgtaccggaaaaatccaacggcatcggtgcttggctggaacgtatgtatctgcgcatcctgcgtttatataccgtggcgctagacttctcgttacgtcacgcactgctcctagcactgaccccactgttattgattgtatcgaccgtcatgcttgccgggacaatcaaaaaaggtacattcccgatccaagacactggcttgattcaagggcgcgccgactccagcacgacagtggcgttccaggacatgatcaaccggcaacaccgcatcaccgagatgttgctctctgacccagccgtcaagagcgtcgccgtgcgtctgggatcaggccgtaaaggttccagaacgtcgttcaacatcgagttgaaaacccgcgccgaaggccgccgcgaaagcactgacaccgtgatgatacgactcagtaccaaagcagcacattaccctgacttggcactgcgcctacgcgccgtccaagatctgcccagcaactctggcgacggtgccaatcaaggagcccaatatcgcatttctctccagggtaacgacctgaaacaactggagggatggttaccaaaattgcaagaggcattaagtaagaacccaaaattgcgtgacatcggcagcgacatggataccgcggagctgtaccaaaatattgtcatcgaccgcggcaaagcagcacagatgggtgtttcaatcggtgccattgacggcgcactgtacggtgccttcggtcaacgtcagatctccaccatttattccgacaccaatcaatacacggtcgtcatcaacgcattagcctctcaaagcgccacgccagcggcactggaccagatccatgtccccaaccgtagcggcaagatggtcccgatcactgccattgcgcaccaagtgccagcgctgaaccctccacagatcaaacacgacaaccagtacacaacgatggacttgagctacaacctcagcccaggcgtgagcagcggtgaagccgaagccatcattgaggccgtcatcaaaggattacgcatgccaggtgatatccacatcgctgaagacaacagcttcaaacaggatctgaatcccaactcaatgaagatactcctcatcgctacgctcctggccgtgtacatcgtcctgggcatgctctacgagaacctcatccatccgatcacgatcttatccacgttgccagcggctggcatgggggccttgctggccttatatgtcagtgataccgaactgtcagcgatttcgatgatcgcactggtactgctgattggcatcgtcaaaaagaacgccatcatgatgattgacttcgcgctggtagcacaacgtgaacgcggattagaaccacatgctgcggtacgcgaagcctcgatcgtgcgcttccgtccgatcatgatgacctccatggtcgccatcctggcggccatgccgctggcaatcggcgttggcgaaggtgccgagctacggcgtcccctagggatcgcaatgattggcggcctattgatctcgcaaagcctgacgctcctcagcacccccgcgctgtacgtcatcttctcctgtctgagccaacgctggcacgcatggcggggcaaatacatggcggcacgttcacattgattacggtgattcgcttcagaaaacaggctgtacgatcggagtcggcacgtgatgcagtgatacagtgcgcagataggactggaacccgccatgaccgcacatcaccaactaccattctgttgcggcaaaccgcatctcccccgggaatgagactacaacccagattgttgtgccgccgccgccgcttcagccgctgctcgagcggcggccaagcgttgcggacggtcacctaactgacgacgcagcaacgcatccaacacaatgggacgatcccaatggtcgtaactggtcactaatgtgtggcgcaacatgcggtagtgcgtattctctggtgccaccggcaaaatggccaaagcagcatgccacccctcctgtaagtgtgcttggtatacctgtaacaccgcatgcaatggctgccgcgtaatcagcgcccaggcaccagcaaaatacacatcagcagcacgccacccctgtttaagcagcgtctgcgcttcggcatgcggtattccgatatagcgtgccaactcatcaacgaagctatctggataatgtttggcatagatatccaggtcagacaattgctggtcgatccacgcatcccctgtcgtcgctgcagacacacccaccgactgcgccaatgcggggaacacagagacgaccaacagcaacgccaacacgaagacgcaacgataaatacgatgcaacaaaaaccgcgaaaacacacaggcagaggacatccattgatgatgccccagaaacaccacggatcgcaaaattgtctcaccgcacttgaaatagaaactcaatgactgtactgcaacagtgacaccgaaataccagcacactgaacactcaccgtagcaccaagcaatcccaagctatagcagaacacacactgatgtgaacctgccccaatccagtgtacaagtccacaacgtgtatgaacgaccgtacccaaggcctagcgtcgttgttcattgttcaatccaacgacagacacaatgccgctatttcatcagccatgtgaaatcatgaaaaataaattcgaaaaacaggaaacagaaatgcgcttttacatctgcatgtgccatcaagcagccaaagtggcgttgtcaatcacaaaacggtacttgacatcacctttcatcatccgttcgtaggcctcattgataccgtcggcacggatcaactcaatgtccgcaacaatgccattctccgcacagaaatccagcatttcctgtgtttctgcaataccaccgatcagcgatccagcaatggagcgacgcttaaagatcagattgaagatttgcggtgaaggatgcggcgtcgcaggcgcaccaaccaaggtcaatgtgccatcccgctttagcagagtcaggaacggatcaagagaatgcgaggcagccacagtattcaaaatcaaatcgaaactctttacatgggcagccatgctttcctcatcacgtgacaccaccacctcatctgctcccagcgccttggcatcctgtcgcttagattcggacgtggtgaatgcaacgacatgcgcccccatggcatgagccaacttaatccccatatgacccaagccaccaataccgacaatgccgactttcttacccggaccggcattccagtggcgcagtggtgagtacgtcgtaatccctgcacacaataacggcgcaactgcggcaagctgtgcctcagggtggcggatgcgcaacacgtaacgttcatccacaacgatcttctgagagtaaccgcccaatgtgtggcccggagcatcatgagtcgggaagttgtaggtaccaatcatgccatcacagtaattctccaaccctgcattgcactcctggcaatccttacagctatcgaccatgcaaccaacagcgacaagatctccggtcttaaagcccttcacatgcgtccctatagcagagacccgaccgacaatttcatgtcccggcacacacggaaaaagcgtgcccgcccattcagagcggacttgatgaatatcagaatggcacacgccacagtaatgaatgtcaatttgcacatcatgcgcacccggaacacggcgggcaatctgcatggactccaagggtttatctccagcgtgtgcgccgtaagcattgataaacattaggatatctccttattatataagtatttttcagtgaaaaaagcggtaatagagcggccacgcacatactaaattcaccgcacacttaatcgggcaaggctaggaaactaataccttcgttcatcggtacatgtcaatgaatggttatgcatcgaagggaagatgtgatgccgcgcctgactggctgcaatcacaattaggccgactcgggccgaataaaactaagtagctcatgatggaatcatcggacatcgcggatgaaagaacgagctgccttgcctgctacaaagtcatactgagacacctatccgtactaccaacgcctcggacgggaccataaacgtacgactatgtgactcaatcagtcctgccgacggcaagatcaccaagtccttactgttgaacagtgcaccgctatgcctctcaacatcaggagtgaaaaacagcggcgtcacacgcttaacgtaagtatcagcggtgcatatccacaatccgatcagcgtttcaatcaaccgcgatttcagcgaattcttgccgaagaagttgtcacgaatattgatcttgatgagaccgagattcaggccgaaaaaatggcgcgccgataacacttatactgcgtcgaataccagcatttcattgccgacaagagtattcatgcgcaccaatattagctttgtaggatattgcggcattgaaacattgccacgtaacgatatggccgctggcaggaaagccatcatgagagcttgtcccaccactaccacagcagctgacgcgcatctcccgaagagataatatccaggaaatatataaaactataatcggacgttattcaaatccacatctccattaattccaggaatacttcccttgctgctgtactgccaaactgaccaacttttacaagctttactccaagtctgtggaattctaggttcatcaacatcccaatgggcaatccataatgggtattcactaaaattatatctgtctccatccactctattatcccagaaatttggtgagcaataaattaatggctttctatccccaaaaatacactcttccccaagcagaagaagcaacttattaaggttgtcggccatcacttctggtgttgcactctcattaccgatcagctccacatccaaagcaaaatattcacatgaagaattaaatccattttgagtcagcacattaactatattatctttctgcgcttctggtgtactgctcaatgcacggaaataatgataagcccctaatgtcatacccgcggatagcacatcgcaacgatacctcgcatagttgggatcctgaaatgtcgcaccttccgttgctttcataaaaacataacctatctcagcttctctcactttcgtgaaatctatttcaccatttctttgagatatatcaatacctttgttgaacatgtcagcatctcctataattatttgaggagcctaatgggatcttatatttaaccctcataaatcataatcatcctgaacttctaataacttagtaaaataaacttatttaatgtgaaatataatttgaatatggcgtgatccatgtcgaaagaaactgttctcataatgaagctggaatcaaagttgcgcgccgagtccatctccgaagcggcccacgaacgaataggtaactacattgagcgacatcgccatgcgctcgaatacgatgacgacttacatggcaagatcaagaaagcacgcaacttaagaggtccaagcgaaattcgccgcgcagcgtacccaccaaattcaacgcgatcgccatgcatcagtgaactgggaaaatcaatccagcaaccaccgctccatctgatgtaaacggttcttgatcgcagatccactcaccaacggccccatgtactgcatccattggatcatccggatgcaatacatcagctacgcttgctttaccgaaccttatgtcatcgttccagcaccaacaatcccactccccctgggaataccaatatcacccaggaaccattgacatgccacatcccatcatggatcggctcaatacttcggcacactcgcatcaacctggatggaccaagcatcaatgccaccaccgatattgtagatagaggtaaaccccagactacggaaatgctccgcggcctggagactacgcccgccgtgatgacacaagaatgctagcggcgtctctttgggaagctgctccagagcagcacgttcgccaccgtccatggtgcgaaacggcacagcgaccgaagcaatcgcacgctcatcagcagggcgcacatccaccaacgtcagagcacccgcaccaacctgagccgccgcatcacctggcgataactcctgaatcggctgaggcgcgtttggattgtcaatcactaacccctggccacggatatcatcaacccaatcaatcgtgatgccctcagcacgacgtgcactggcaagatcaaactgcacccgtaaaccgttagattctgcagcaatcgcctgcgtattaattggcgtcagctcaaaagtaggttggaaacgactatcgattgacagtgccaacgcgctcccgggcgcattggctaatgtactcttgagcatctccacagcagttggagtgatcgtgatggatggcggcgtaagatccggagcagccacaccaagcaaagcgctcaactccccgttctcatacatctgcgacacgatgtcactgccaccgatcaactcaccatcaatgtacaactgaggaattgttggccaatcgccatagcgtttgatcccctctcgaatctcttggtcgtccaatacattgacatgcgcgtactcgacaccaagtgcctggaggatgcctgcagccttagcagaaaaaccgcactgcggcatccccggacgccctttcataaacaaaacaacacggttggaatgcaacaacgtttcgatgcgcgaacgcaatgcagaatcaagagacattggggaaaccgatcatgggacgtggaatagctgcccattttacgcctgcatgcgatgatgcggacatgacaacaaaagaaataccacattacaccgtgatgcctgcccgtccctggataagctggcttatcttgctacacctcaccgccgccgtactgtggccgtacctaggttggaactggggactgacgatgattttcatcacccatatcagcttcctattggcaatatttttaccccgatcacggctctatgcgcccgtcgttgtccagttggacagcacgccccccctcgtctggctgaccatcgacgatggcccctccgatgacaccgcagcaatgctagatctgctcgaccgccacgatgcgcgcgccacgttcttcctggttggcgaacgcgcggcacgtcaacctgcattggtacaagacatactgcaccgtggtcatgccatcggtaaccacagccagacccacccacatcaatggttctgggcacttggcccacgtcaaatggcgaccgaaattgcaatggcacaacgcaccttaaccgagatcactgggaccccaccacgctggtaccgctcagtggttggcatgaccaacccatgggtggccgcgccattacgtcaatacggtctggaccgtatcgcatggagcgcgcgcggctttgatggaagacactgtgaaccagataaagccgtaaaacggatcgtgcgaaatctgcgccctggtgccattgtgctgctacacgaagggattgcacatggacacaacctcacgatcctaagccaagtgttgcaagccctggatgcacgcggcttaaaagcgcgtaatccccattgacggattacgccgccaacacgactaatgcacccactgctgcctgcatcaccccaacggcaccgatgacacatcaacacggccagcttgaaattaccctgcgtgacacatccgctaacaccccactcaccctgtctcccgacaatacaaccactgcaacaccatccaggaaggccgtactgccacagcccttcctgattgacattgagtacgtcaactgctcctacttcgcaaaccacatagtccccacccagagggagccgcgtgcactcctatcaagcggcggcgctacgcgacttgagcggcaccaccttctcagccacctcagcacggcgcgacaaggcccggtcaatacgagaaaacacttcacgtatcaacgcagcatcaggaagcaacgtcacgcggaagtgatcccgatatggcacattaaaacttgatccaggcaccaccagcaccccctcgtcattcatcaactccagcgcaaaagcataatcatcaaagtgccgcgccgccggtcccacgaccgatgggaacgcgtataacgccccagcaggcaccaccaacgacaaatgctcactcaccacgcaggcctcaatcaccgcacggcgcgtctcgtacaaaggaccaccaggcgaacataacggagtgatcgtatctggcccattgaccgccgcatcaatcgcatattgccctgggacattcgcacacaaacgcaacgcacccagcaaatccatcgcattgcgcagattatcaatttgaatgctactcccggacagcaacgcccaacccacacgccaaccgcacgcacgatgcaccttactcagcccactgaaagtgatacatggatgcgtccccgccaaaggagccactggaacaaacaccgcaccgtcatacaaaatctgatcgtaaatctcatcaaccaacaacagcagatgatgtttcactgcgattgccacaatccgctccaataactcctgcgaataattggcaccactgggattattcggattaatcaacacaatcgcacgtgtccgtgaagacaccagcgtttcgatctcgactgcatcgggctggaaaccgttctccggcgcacaacggtaatacacgggccgaccatcgttgagaatcgtcgccgccgaccacagcggataatccggtgaaggaaccaacacctcatcgcctggattaagcaacgcccgcaacgacaaatcaattaactcagaaaccccattccccacaaagacccgatctgcatcagcatctggatagtgacgtcgtacataagcagcagcaatcgcctcacgtgcgattggcaaaccctgctgatgcgtataaggatcggtacgtcccatatcatcggcgatggcacgttgcagatgctctggcgcccggaaaccgaacgcacctggattaccgatgttgagcttgataagcttgcgtccctccgcctcaagctcacgcgcacggcgcgccaactcccctcggatctcatagcgaacttcggacaatcgctggcgcgtggcaagcggcgtttgcgggctattagacatcacggatgtgaatcaatttactgaaagtcgacatgttaattcaaaatacaacaccacgtcagaccttatatccctttatcatttacccagcagcgcctggcgttttactagatgaacattaactagatgagcagtttccatcaacaccactgcctcccaacagcgcggcaactcaacactcaccgcagtgcactccctgttactcaacagatgcaacaccaacaacgctgactggattgctgcactttataacgcaccgcgtgacaacagcatgactttaaaaaatctacttattaataagtgattactgaaaatttaaactgcgatgtagtgattcattaaacatcgaacatcggtgttttaaatattttaaatagcaataaaggaaaaggattgcacattaaggatggcaacatgacatacaaaagtccccttgtaacgcaacagaaccaaggcgcttccaatccacagcctgacagcgcactccacggcttagtgctccttgcccaattccatggcattgcggctgaccccatacagatagcgcatgacttcgggcgcagtggcgaactattcgatgaaacaaccttgctactggccgccaaaaaactcggactaaaagccaaagtcgtcacccaaccggtcacccgtatcgcaatggccgcattacctgcactcgcactgatccctggaggaacagcatttatcgtcgccaaagtgacaggcaaccagatactgatccacgacctggcagatcaacggccacgcacaatctcacacgatgaatttaccgcacgctacgccggtcgcttactccaagtcgcctcccgcgcatcggtcctaggaaatctggctaaattcgactttagctggttcatccccgcagtggtcaaatatcgcaaactgctggctgaagtctttgcagtgtccttatttatccagatattcgcactggtgacacccctgttctaccaagtcgtgatggacaaagtgctcgtacaccaagcactcagcacccttgaagtcattgtcgttggcctgatctccctggccttattcgaagtactgctcaccacactacgcacccatgtcttcgcacataccaccagcaaaattgatgttgaactcggcgcccgcttattccgccatctattagcactccccttagcgtattttgaatcgcgccgcgttggcgacaccatcgcccgcgtacgcgaactagaaaacatccgccacttcctcaccggccaagcactgacctccgtcttagacctcctattcaccgtcgtcttcttgtccgtcatgttttggtacagcagctggctcaccctgattgtggtgatctcattacccctgtacgcactgatctccgcattcatcaccccagtactccgcaaacgtctggatgaaaaatttgcacgcggcgcagacaaccaagcatttttagtagaaacagtcagcggcattggcaccgttaaagcaatggccgtagacccacgtgtcacccgcacctgggacaaccaactggcgggctacgttggcgccagctttagcgttaccaaaattgccaccctcggccaacagagcgttcaattagtacagaaactgaccaacgtcgccgtattattttggggcgccaaactggtgattgacggacaactgtccctcggacaactgattgccttcaacatgttgtccggccaagtcactgcccccatcatccggctcgcccagctatggcaggattttcaacaagtcggactttcggtcgaacgactgggcgaaatcctaaatacccgtaccgaactccccggcagccgcatgacattgccgcccatccaagggcgcatcaccttcgaacgcctcatcttccgctaccgtccagatacccccgacgtactcgccggaatcgacctagacatccaacctggcgaagtcatcggcatcgtaggacgctccggctctgggaaaagcaccctgacaaaactcgtacagcgcatgtacgtcccagagcgcggccgcgttttggtcgacagccacgacctctcattggccgatccagcctggctgcgtcgccaaattggcgtcgtactgcaagaaaatttcctgttcaaccgcagcgtccgtgaaaacatcgccatggccgacccgggaatcccattggaacgcgtcatccacgcagcaacattagccggtgcccatcccttcattgctgaactgccagaaggctatgacaccaagattggcgaacacggtacaggactctccggcggccaacgccaacgcatcgccattgcccgcgccctgattggcgacccacgcatccttattttcgatgaagccaccagcgcactcgactacgaatcagaacatgccgtcatgcaaaacatgcgagccatttgcaaaggccgcaccgttctcatcatcgcccaccgcctctccacagtccgcaatgccgatcgtatcgtcgtcattgataaaggaaaaatcgtagaaagcggctcccacgaaacactcctcaaccgcaacaacggtcattacgcccacctctaccgactccaacaagggaccacatgaaacacatgctccaaggatggcgcgactttctttcgcgttacctccacgtcttccgtgctgcctggtcgattcgcgcccaactagaaccacctcaccgcaccgccgatgagcgcaccttcctacccgcccatctagaactgaccgaaacccctgtctcccctaccgcacgctggagcatgcggatcattattgcctgcttcatcgtggccctactgtgggcctgcttcggcaaaattgaaattgttgccgtcgccccggggaaaatcgtcgtcgactcacggaccaaagtactccaaccactagagaccgccgtagtacgccgtatcctgatccgcgatggcgaaaaagtgaaagcacaccaagcactgatcgaactcgatgccaccgccaccaacgccgaatacacacaagctgaagatgccttactcaatgccacattgaccgcattgcgcctgcgcgcactctccaccgcactagaacgtggccaaacaccgcaactcacccattcagcaaccatccccgctgatcgcatcgccgccgaacaagcactcacactgagccaattcaacgcattccaagccaaacgccacaacttacaagccaccattgcccaacgccgcgccgaactacggacagcccaagacaccatcgaaccattgaccgaatccgcacgcatctccaaaatgcgctccgccgattacgccatcctcctcaaagaccaatacgtcggccgtcacgactacctactgcgtgaacaagaacgcatcaccgccgaacgcgacttagcgacccaacgcaaccgcatccaagaaatccgctccgccctgagcgcagcccaagaagaactcagcgtattacaagccgacttccgccaacaaaccctggatgacctacgtaaagccgacgaacaaatcggccaattgacaccacaactcgccaaagccaaacaacgtaaccgactcatgacactacgctcccccgttgaaggcatcgtgcaacaactggccatccacaccgttggtggcgtcgtgacccccgcacaacaactcctagccgtggtcccagtacaagaaaccttagaagtggaagccaccgtcctcaacaaagacatcggatttttacgtcccgaacaacgcgtcaccgtcaaaattgaaagcttcccctacacccgctacggatacctcaccggcaaagtcgtcagcatctcccatgacgccgcacaagacgaaaaactaggcttagtctttcccgtacgcatccgcttagacaacaccacactcactattgatggaacacaaatcagaatgagcgcaggcatggcattaagcgccgaaatcaaaacaggcaaacgcaccgttattgattacttactgagcccactaaaacaatataccgacgaagcattgcgggaacgataaactccaccatcaacattggcactccaatgcgcatccatcctttcccccaatgccaataaacaccaccaccgcatcacacaagacacaccgccccccctgtcaacacacctgtaatgacgcctcaaacacggccaccgcaacaacacccacagcccagacaccacccacaccttcccccttgaaagacagccgtgcaagccccctcgctcacctcaccgcttgcctgcaccccccacccacaaaacagcacatccacaccgcccacaccgtgcccccttacatcaccaaaaaatagtgatataaatcgcaaaaaataaggcaaaggaagccgcacccaatgcaacccaaggacaccgcagagcatccggccacagcggccttccctccctgctccctgccagccccgtcacctccccctcctatcaccatcaatcaataccctgccactgtctttatataaaaagacggagacagcatttttttatccaacttaaagacggagacaatcaatgacgcagcgcccctctttactaacgactccagaccgcaccataaacagcggcaaacatcatacggaaaacaccacacccccccatgatgctgcggtggtgtgacaatgaatactgcaaacgtatttaaaaaaatactgaaattatgtggaatgattgtgattgccttactcatggcattcggggcttttatctcctacgggatcatttatatcaaagaaaaagcacaacaagatgctattgcacagaaaatcaaagaatcaaatgaaattctgatgctccaatcagatgactccagctacaaaagatgcttcaagtttgacaaagaattgtatgcaacaggacttctgcatggaattatcatcttttattttaataattttttgtatatttcaggggtcgagaaatccccatcaaaaccccatgggccaccaaactcaagcgtcaccatagggatttttggcaaatatgtatcaaagaaaaattacatcaactcttataataaacaagaccaaaacaaacaaacgacggttataggaaaataccaagaattacttttatatgaattctcaaataatacttattcagcaatggataagaatgatatttttgttattgaatataaagctgatgatggccaaccaaaaaacaaaaaagagcgaatccatgaattaaaattaattattgatttccttgaagcccataccatcccctgtcaaggagaatcatgatgacaagttcatatttttattttgatcaagcgacattagatcgtgctgaggcttacagaagttctgggaattgcccggggatgtaccagatattatccgatgccgtcaaagccggcggtggcgatgccagattagccaatgggttgaagaatgccggggacatccattccgcacaaggccgcgacacaccgtctatccgtgcagcgatggatcaggccgaccgtgaagaaaataaaataaacacacagcatcatcctgcggcgctttaatcatgaatagtccaagagtatttaaatccctactgaaattatgtggactgcttgcgcttaccgtgctgatggtattcggtgctattctctcctgcgggaaaaataatatgacagaaacaacaccgcaacgggccgctgcacaggacatcaaggaggttagtaaaatgatgatgcttcaatcacgtaattccagtgataaaagatgtttcaagtttcccccagaagtgtggcccatccaattttcaccgagcaaggccatattttattttaaaaatattgggtatctttctggcatcgaaacatctccaggtaatctcggtgaagccggaacctcgatagtcgctctcatcttttttcctgacaaatcaagcaaagaatattatatccatgcccgtttgcctgctggaagcaatcagcaagtagaaatcatgggagaatacaaaacattctatttttataatctcagagatttcctttattcggcgattgataagactggattattcaatattgaatatcagcctggccaaccaagaaacaaacaggagtggacccatgatttacagttaattattgattttgttaatacccataccatcccctgtcaaggagaatcatgatgacaagtttagatttttattttgaccaagccacgttggagcgtgccaacacctataacaataccgggaatgactgggcgatgtaccagacattatccgatgccgtcaacgccggtggcggcgatgccagattggcgaatgggttcaagaatgccggggacatccattccccacaacgccgcgacacaccgtctatccgtgcagcgatggatcaggccgaccgtgaagaaaataaaataaacacacagcatcatcctgcggcgctttaatcatgaatagtccaagagtatttaaatccctactgaaattatgtggactgcttgcgcttaccttgctgatggtattcggtgctattctctcctgcgggaaaaataatatgacagaaacaacaccgcaacgggccgctgcacaggacatcaaggaggttagtaaaatgatgatgcttcaatcggatgatcacagctataaaagatgtttcaagtttcccccagaagtgtggcccaaccaatttgggcctagtatgatgctatttcgtttcaagactattgggtatctttctggcattgagacatctccaggtaatctcggtgaggccggaacatcgatagtttccctagcactttttcctgacaaaccatggaaaaaacattatatccataccctttcacaggcttataggaatgggaaagttgaaattattggagaatataaagagtttaatttttataatcttagggacttcctttattcggccattgataaggatggaatttttaatattgaatatgatgctggtgatggtctaccacgaaacaaagaggagcgaatccgtgaattaaaattaattattgattttgttgcagcccataccatcccctgtcaaggagaatcatgatgacaagtttagatttttattttgatcaagcgacgctagatcgtgctgaggcttacagaagttctgggaattacccggggatgtaccagacattatccgatgccgtcaaagccggtggtggcgatgccagattggcgaataggttgaagaatgccgaggacatccattccgcacaacgcggcgacgcaccgtctatacgtacagtgatggatcaggccgaccgcgaagcaaataaaataaatacacaacatcattctgcggcggtttaatcatgaatagtccaagagtattggaacgcttactgaaattatgtggactgcttgcgcttgccgtgctgatggtattcggcgctcttctctcctgcgggaaaaataatatgacagaaacaacaccgcatcaggccgctgcacaggacatcaaagaggtcagtaaaatgatgatgcttcaatcggatgatcacagctacaaaagatgtttcaagtttcccccagaagtgtggcccaaccaatttggacctagtatgatgatatttcgttttaagactattggttatctttctggcatcgaaacatctccaggcaagatcggtgaggccggaacctcgatagtctccttagcctttttccctgatcaaccatggaaaaaatattatatccacactgtttcaaatactgacagcaatgagcaagtggaaattatgggggaatacaaagagttctatttttataatctcactgagtttctttattcagccattgataaaacggggcttctcaatattgaatatcaacctggccaaccaagaaataaacaggagtggacccatgatttacagttaattattgattttgttgcagcccataccatcccctgtcaaggagaatcatgatgacaagtttagatttttattttgatcaagccacgttggaccgtgccaacacctatagaaatgccgggaactatccggcgatgtaccagacattgtccgatgccgtcaccgccggcggtggcgataccaaattggtgaattggctgacacttgccggggagattaattcagggcgaagggaaaatttctacgcagactttgtgcgcggcgcggtgtatcacgcgggcagtgaggcgggtatacctattgatgcggcgctgtttcagcacgtctccgacttgcttgcaaggaatgtaatgaatgatgccttacaaaataaaatgctttctttcgacagagtcatttcaagagacgtggcggccgcctcagaaccagtaggagcaggcggattggggctggcgatggataaatggggcgggacggtgggcggcgcgttcccaatctctgtgggtgggcttgggatggaccccaattccgcgttttatcaaaatcttgaaaaattctatcgggacaatggatatacccctggtgatcgggctgccagactcttcgatttgttggatgactctttcttcggcctgattgaggtggctaaaaatccgatcgccatcaatgatcttgcaaacagaattacggtcaatacgctcactcgattcgccatcatcacgcaacgtcaattagatgttgcgaatatattttctgggttacaaggtgatgccacgcagagcggcagcctgtcagaaattgtctgggacaatggccgcaataccgtcacaaacgcaggaatcatgttattcccggtctcgcctttggctggggtcggtatgcagatgggcatcaatatggggatggccgttgctcccttggtgggtgatgttttctccggggcaacagccacctggaaccgttggatgcaaccgctgtttgatcaactgctagatatggtccgcgacagcatccaacatggcgccgatgcggtgcggcaaacgctgcatgactggtggacccatatcggcgatgccttccaccgcctgggcgagaagttgcacaaagacagcgagtccttcacagatctgctgcatgacttgtttgaccaaagccgtgattacgtgacgccctgcgacccactggcgctggacctggacggcgacggtattgaaacggtggcccctggtaaacacattctgtttgatcacgacggcgacggcatcaaacacgccagcggttgggtgaagtccgatgatggtttattggtgctggaccgcaacggcaacgggcgtattgataacggcaacgaactgtttggtacagaaaccgtcttgtcaaacggacgtaaggcggcctctggctttgaggcgctgcgtgatttagatagcaacgccgatggcgtcttcagtgctgccgatcgccgttttaacgaggtgcgcgtgtggcgcgatctcaatcaagatggccagtcccaggccaacgaactgttcaccctctccagcctgggcattgcctccatcaccctcacgcccaccaccaccccgccaatctccatgccactgggcaacggcaactttgtcggtgccagcggtatctacacccgcaccgatggccgcactggtggcattaacgacctgcaattaggcatcagtcgcttctatcgcgataacagcggcgcccaggagcaggtgacggtgagcgctgccgctcgtgccttgccaacgctcaaaggcagcggcgcagtgcgcgatctgcaagaggccgccagcctgtcgcccgcgttactggcggcagtgcaagcgctgttgtccggcaccacccagggcacaatgcgcgcggcgctggatcaggtgatcgccttgtgggccagcacctcgaccatgctgagcactgaggaacgcctggaagcgtccgggaacagcaaccgcacggtgtattaccacggctgggtccccgggagcgtaacctcccagggcgaggcggcagtgcaaacctggatacaacagcagcacgcccggcttgggccaatcatcggcattttggagaaattcaacggctccaacctggtcagatataacaacgatgcagtgagcacggacatcaatgtcttccactggtaccacgatacgatgagtatccgactggtggatcagaggcagattgatccactgattgaggcctacgccaagcttaaagaatcgatctatatccgcctggtgctggagccacggctcactgattacctgtccggactccgcctgacctacaacaacggcgtgatggcatgggatgcctccggcctggaggccaagctagatcacacctggcagcacaacaaagctcaggcgctacaggatgtgatggacctataccgctacagcagcgatgctctggcccccagcggttggaatccgctgaatggcttacgccagatgattgataagactgcggcaacccccgatggaaggcaggccctggccgatgcgggcattcccctgattgccggaaatgccgaaggcagtgacgccgcagatctgctgtttggcgatgcgggcgccaatctcctgcggggcggcggcggggatgatgtgctctccggtggtgatggagacgacacactgtacggtggcgatggcaacgacatcctccacggtgatgccggtaacgacactctctacggtggcggcggcaatgatctgctgctgggtggagatggcgatgacgtcctagacggcggcgaaggcagcaaccgtcttgagggtggtgctggtaacgatgtcctgaaagtggcgtatcggtccgcagataacgtgctgatcggcggtaccggcgatgacacgttgtatggcagcggttacgcggacacgtatctgttcaacaaaggagacggccacgacacgatcattgagaaaagcggtgatgacacactcgtctttggtgaggggattgttgctagccaggtacgggtgctgcgcgaagggcaagatgtggtgctggacctgggcaacggccacgacagcatccgtttgaaggactggttggattccaacggttaccgcaacggcaacaatgacattgaacagatcgtctttgccgacggcacgatctggactccagagaccttgagcagcatgggcctcaccacactgggcacctcgggtaatgacaccctcaagggctggcaaggcaaggatattctgctgggtggagatggcgatgacgtgttggacggcggcatgggcagcaaccgcctggaaggcggcgccggtaacgatgtcctgaaggtggcgtatcggtccgcagataacgtgctgatcggcggtaccggcgatgacacgttgtatggcagcgcttacgcggacacctatctattcaacaagggagacggccacgacacgatcattgagcaaagcggtgatgacacactcgtctttggtgcggggattgttgctagccaggtacgggtgctgcgcgaagggcaagatgtggtgctggacctgggcaacggccacgacagcatccgtttgaaggactggttgacttccgacggttaccgcaacggcaacaatgacattgaacagattgtctttgccgacggcaccatctggactccagagaccttaagcagcatgggcctgacgacgctaggcacctccggcaatgacacgctcaagggctggcaaggcaaggatattctgctgggtggagatggcgatgacgtgctggatggtggcatgggcagcaaccgcctggaaggcggcgccggtaacgatgtcctgaaggtggcgtatcggtccgcagataacgtgctgatcggcggtaccggcgatgacacgttgtatggcagcgcttacgcggacacctatctattcaacaagggagacggccacgacacgatcattgagcaaagcggtgatgacacactcgtctttggtgcggggattgttgctagccaggtacgggtgctgcgcgaagggcaagatgtggtgctggacctgggcaacggccacgacagcatccgtttgaaggactggttgacttccgacggttaccgcaacggcaacaatgacattgaacagattgtctttgccgacggcaccatctggactccagagaccttaagcagcatgggcctgacgacgctaggcacctccggcaatgacacgctcaagggctggcaaggcaaggatattctgctgggcggagatggcgatgacgtgctggatggtggcatgggcagcaaccgcctggaaggcggcgccggtaacgatgtcctgaaggtggcgtatcggtccgcagataacgtgctgatcggcggtaccggcgatgacacgttgtatggcagcgcttacgcggacacctatctattcaacaagggagacggccacgacacgatcattgagcaaagcggtgatgacacactcgtctttggtgcggggattgttgctagccaggtacgggtgctgcgcgaagggcaagatgtggtgctggacctgggcaacggccacgacagcatccgtttgaaggactggttgacttccgacggttaccgcaacggcaacaatgacattgaacagattgtctttgccgacggcaccatctggactccagagaccttaagcagcatgggcctgacgacgctaggcacctccggcaatgacacgctcaagggctggcaaggcaaggatattctgctgggcggagatggcgatgacgtgctggatggtggcatgggcagcaaccgtctggaaggcggcgccggtaacgatgtcctgaaagtggcgtatcggtccgcagataacgtgctgatcggtggtaccggcgatgacacgttgtatggcagcgcttacgcggacacctatctattcaacaagggagacggccacgacacgatcattgagcaaggcggtgatgacacactcgtctttggtgcggggattgttgctagccaggtacgggtgctgcgcgaagggcaagatgtggtgctggacctgggcaacggccacgacagcatccgtttgaaggactggttgacttccgacggttaccgcaacggcaacaatgacattgaacagatcgtctttgccgacggcaccatctggactccagagaccttaagcagcatgggcctcaccacgctgggcacctcgggtaatgacaccctcaagggctggcaaggcaaggatattctgctgggcggagatggcgatgacgtgctggatggtggcatgggcagcaaccgtctggaaggcggcgccggtaacgatgtcctgaaagtggcgtatcggtccgcagataacgtgctgatcggtggtaccggcgatgacacgttatatggcagcggttacgcggacacgtatctgttcaacaaaggagacggccacgacacgatcattgagcaaggcggtgatgacacactcgtctttggtgcggggattgttgctagccaggtacgggtgctgcgcgaagggcaagatgtggtgctggacctgggcaacggccacgacagcatccgtttgaaggactggttgacttccgacggttaccgcaacggcaacaatgacattgaacagatcgtctttgccgacggcaccatctggactccagagaccttaagcagcatgggcctcaccacgctgggcacctcgggtaatgacaccctcaagggctggcaaggcaaggatattctgctgggcggagatggcgatgacgtgttggacggcggcatgggcagcaaccgtctggaaggcggcgccggtaacgatgtcctgaaagtggcgtatcggtccgcagataacgtgctgatcggcggtaccggcgatgacacgttgtatggcagcgcttacgcggatacgtatctgttcaacaaaggagacggccacgacacgatcattgagcaaggcggtgatgacacactcgtctttggtgcggggttgcatcagaaagaggcccgctttacgaaatcaggaaacgatctgtctatcctgttcaatgcgagtgaggatcaggtgaccatagcggggtggttcaacgggtcagggcatcaggtggaatcgttggtgttccaagatgggacggtgctgtccggtgaggtggaacgtttgattgcagcgatggcgctgtcctctgcggtgacgacgacgcaagccagtgtgcgtgataccaaggagtcacataggctggtggccagttcgattgtctaaagtgtgtgatctgttgttgtgttgccaggccccgcagttgcggggcctggtgtgttgcgtcgttgtatggcgcgatggcgataccaggagatcaatgtggctgatgaggttggctacgggatgaggttgccatgcacgccgcacgatgtgctgggatgcagcagcggcattatttttgacttaaatcacattttttatcaggccgctatcatgtacaggcagcggcgggctgtggtgttgcaggcgtttgaagacgctggcaccgcgctgcgctgccatgccaaggtgctgctagcaacaggcagcgccatccctccctctctagtcaaggattaatgagacgatgcaagcacgttcttctgcttacgcacgctattggcgccattcactggctgacagtggaacagaccgtggtgtacttcgtgatgctgctgacacttcattcttggaggtgtccaagcagcaattagaaagcggctgtgtggaccgcaacattgtcgcggcctgtttcaataaagaaggcgaacaggtccaaacggtcgaagtggtgatccgcctcaaggtctatgtgctgctgctacaacacggcacgccgcagcgcgcgggaaaccccaagatcgtcacgccgctggtgacacaggcgttattggggcgggatggcaggatctatccgttggcgaagacgatgatctgtcgtgacattttggagcctttggcagggggacatttcgcgattggcacggtggcggatcaggatgcgtttctgacaaggcagccagtgcctggcattgcttttacggggacagaaaataatggggactcattggaggagtccaacaatgccgactttgatcggcaatggaaggagtttctagcgggttgtgatcggctattagcggaggtcggtggtgcctggcccggcgctcagggggattatctggaggccgactatgggtatctcaccaagaaagcagcgttctccagccgacatatcctggctttatacgaccatcttttgctcgaaacaacgccacaggtgccgttgtttgagcgctatgccagcggtgagatggcgccgccggaaccgtgtttgccgccgcatgccgggttctcacaacggctggcgcatggcaacaatgagcatcctttgacccggacgcaacgcgatgcgctaacgcatctgctggtagctcgacaaggggaaattcttgcggtgaatggcccgccgggcactggaaaaaccacgctggtgttatcggtggtggcgtcgttatgggcgcatgcggcgctggcagggggggagccgccggtcattgtcgctgcgtcgaccacgaatcaggcggtgaccaatatcattgatgcgtttgggaagaattttgcaaagggagaaggtccttttgcggggcgttggctacccaaaattaatagtttcggcgcgttattaggctcggacgacaaaaagaaaaagacggcagacaaataccacaccgaggatttttttaatgcggtggaatcagccggctacatcgctgaggcagaacagcattatttgcgtgcggcggcggcggcatttccagagatcccgcaggcgtcgttcaatgtcaagagtgtcaccgcggcattgctggggaagattcggaaggaggcggcaacactggccgacattgagcaggcgtggtcaggcttgaatgatgcgcgtgatgcgctgcgggccgagttgggggagaggcccgctacgacgatgacgcaacgccgcacccaacgggacgcagcgcaggcggagaagcaggtcattgaaacgctcatcacccagtgggagcgctatgctgcggacgagtcgctggtgtatgggttgttttcttggctgcctgcggtggccaaaaagcggatgcggttgatccgtgtgtttttgaactccatctggccagtggattacccaacacagacgtgggagagcattgagcaggttgatgggtggctcagcgagatacagcgccaatgtgatcacaggcttcaggagcactcctgcgctgtgacacgcggtgaagcggtgctggatgcggagcagtgccacatcaccacatggcagaaggcgttagcacctctagagctgacggaggcggaggcggcaggccaggtgtctcttgcggactgtgatgcacacgccgatacatccatccgctttcggatctttctgctaaccacgcactattgggaggggcgttggttgtcggagatgcaggcccagttgccaggggatctggatgcggagaagaaaaagacggggcgtaccgccgtggaaccgcgctggcggcgacggatgaaattaacgccgtgtattgtgtcgacgtttttcatgctgcccaaaaagatgcaggttttcaggagtgatgagaaaagcttcagccctcactacctctatgactttgcggatttgctgattgttgacgaggcgggccaggtgcttcctgaagtagctggtgcgtcatttgcactgggcaagcaagctttggtgattggggaccagctgcagattgaaccgatttggtcgattccgaaaagcattgatattggtaacctgcaggctgctgagctgctggggaaggaggaggatgcctacgagcgggtttgtgagtctggaagatccgcggcgtcaggcagagtgatgcagatcgcacaacggctgagccggtatcactatgaccctgcgatggcacgcggcatgtttctgcatgagcaccatcgctgctttgatgagattgtcagttactgcaatgcgctgtgctatcaaggcaaactcatcccccaacgcggacccaaggtggcagcgctgaagaatgcagaaggaaaggaaacaggagacagtttgccggcgctgggatatctgcacgtcgatggtctctgccagaaaagtagcggcggcagtcgatataacctctatgaggcggaaaccattgcggcgtggcttgccgagcaccacgagtcgctgcaagcacagtatggggagccgctgcatcgcattgtgggcatcctcacgccgtttgagacgcaggcgcgtgcaatttcacaagcctgccgtgacgtgggaattgaggtgggccacgaaaaggatgggatcacggttgggacggtgcatgcgctgcaaggggcggaacggcctgtggtgatcttttctgcggtgtatagcaagcatgccgatggcggttttatcgaccagcgcgcaagcatgttgaatgtggcggtatcgcgtgccaaaaacacttttttagtgtttggggatatggatgtcttcacggcggcaccaaagagcaggccgcgtggcctgttggcgcattatcttttcaaagatccaagcaacgcgctgtgttttcaaccgttagtccgcaaagatctgcaacaggtcagtacagcggtggaggtactgcaggacgccgccgaacatgacgcttttttattgcaggcgctcaacaaggtgcagcgtgaaatccatattgtgagtccctggatcaacaaagatcgcattcaagacatcggtgccttcaaagcaatgcaggaggcggtggagcgtcaggtgcaggtcacggtctacacggatcaggatttgaacaccgacgataagaaagacacaaagaagatcgctgaagtgctgcaagccgccagggcgttgcgcggtgtggggattgaggtgcattttgtcgacagagtccacagcaaaatggtgattggggacgatgaggtgttttgtgttgggtcgttcaattggttcagtgccaacagaagcgcaatgtacgccaagcatgaaacgtcattggtttatcgtggtcgcgggcttgcagatgagaggcaaaccaggctgaacagtttacggcagcgaatcacggatgatcctcagcaagtcggccaggcgtgatgcggtgttgcggcagcgggatgtagatacggggtggcggcaggcgatgcacgcagctgcagaggggcgcgatatggtcagccctgccgttgcgttgcgtgccgtggcactgcttaagctgtgttgttgtttgccgcttgggtagttgggtagttgggtagttgggtagttgggtagttgggtagttgggtagttgggtagttgggtagttgggtagttgggtagttgggtagttgggtagttgggtagttgggtagttgggtagttgggtagttgggtagttgggtagttgggtagttgggtagttgggtagttgggtaattgggtaattgggtaattgggtaattgggtaattgggtaattgggtaattgggtaattgggtaattgggtaattgggtaattgggtaattgggtaattgggtaattgggtaattgggtaattgggtaattgggtaattgggtaattgggtaattgggtaattgggtaattgggtaattgggtaattgggtaattgggtaattgggtaattgggtaattgggtaattgggtaattgggtaattgggtaattgggtaattgggtaattgggtaattgggtggttgggtggttgggtggttgggtggttgggtgtcttggaatgatctgggaagcgctgccctgccccatgtgcatcacgattgcgctcgggaaatgggcgttgcaccggcggggaaacggtgcgacgcggcttgagggggtttcctacagattatggtttgcgtgagattgcaacaggcctgtctgtcatggttacgcaaggcttggtgttgcttaaagagtccgcagcggttgtccgtcagtcagtgaggaagagaacccccatagatgagttctaatgccatccgggcatactgtctgagctgcccatcattcattggggacaaggatttagagtcatcgtgatgcgattgcactgcgaaggcgttgagtttttcaagcgtgtcaacatacggcttggccagcaccaacggagaatcatcggtcgccttgcggatgtcgctaatcatttgaccaagtgacagatcttggcgcagcaacggtggcgcaaagcgatgcttgagaaagccttcgacaagtggtctgagcgcagatgcgacctcctgcaatgtcccctcataggtaccagacacaaaagtgaccacctgggcgtatctaagcatgtagggggactgacagatggtgtccaaatccgcgtcagacacaatctgggagtcgttatttttggtgcgcttgatatggtgaacgttcacagaaaccttgttgtaacgcggaccagcaagcaagtcgcgtaggtcacgcaagaagtaggcatcgtgtgaaagcaccacgacttgaacgccttggtttacaagcgctgcgatggactccatcgtcctgttgcgccttgtcatatcgaaactacacataggatcatccagcacgacgctcttgccgacgagtgcgtccggagtggcatacaaacgcgccaggaaaaatgcaagcgccaaggtacgcttgtcgccttcactcaacacgttgtggaagcctgggtctgagtcggttcgcctgccgagggcaacctccttcccacgcaactgcagaacatagctggctcgcatcgtgccaccttgcatactctgctgcaattttttgatggagaaagctgcgccaaaatcgcggagaaattgattaattttggatgcatactcactcaaaaggtccggcaatcccgcatcaagtgcggcacgcatgttcttcttttcacgctcaagctgctctttcttggccttggccgcttgatacacggtgattgcttggacaacctccgtagattgacggacgatgccaatctcaagcgtggcaatagaggcatcaagtgctgcaggggtgttttctgccaatgtctttctgaaattagtgatgcgcctgttgatctcgaccacagcagcgttataggcatccatctgtgctctcaactcctccagaagccgaaccatgtcggccttgtcctgggtggttccgacacaatctaacggcctgtgctgtttgctctgggcaagcgcaagggccactgtccgcagacgcgtgaatgtcgctgtggcacgcgggttgtcgaagaagggactcgataggtccagttgatctttccatgctgcgacgcaggcgtcattgccttgtatgcggtcagctattttttccaagcaggcttctggaaaacgcgttgccaccccggaaccgagcgtggcaacgttcttcatgaacgccttgaaggcggtgttgaagtaggtctcataagccttgatgagggctgtggctgtcacttcttgaccgcagaacgggcacccctgttccgcgttgaattcccgcccctgcatcacccacgcttcaatccctggtggctgctggtgccgctggaaatgtgcttggacaatttcctccgcatcagcgcggatgtcatgaaacgtggactggatgatgctgaaaaaggcgtctatgttgcattcgatgtgcggtaatggctgcggtgcatggcgttgcaataaggcgggcgcattgcgcaccgcctctctctgggtacggagtgcggcaatctttgcctcagcatcggtcacaggtatcaatctgatgaaatccgcaataggcatgtttttactataggcccgaatccgctgctctctctctttgatattgcggtgttcgtcagcaatctcctttgccagcctgacgatctcccgctctaacttgacagactccgcaccgaggacaaattggagaaatttctggcgatgcgcgggatgcacttcctggccggagtagacgttgtcgtcaacaaaggtggcatcaaaaatgagaatgtccggcggtgtgccggtccaatggccgtgatgcagagtgacttttatatccgtattgccatcgttccatagcagttcaatacacggcgggtcgtcagtgtcgatcgtgcgtgccttctgaagcacctcgtctttgtctttgccatgcgtcacggcgcggagaatattcgcaacggtcgtcttgccgcgcccgttctcggcatagaacaacgtcacagggccaaagggcgtgggggtagtaggcggcactccgttacgaagcaagccaacatgattgaccttgatcagtttcttcagcatgaccgctcctgttgcgcttccataaaaatagatgtgactgccacgaaacgcagctcaggcttgacagcaagaaggcggctgcttgaagggcacttttctgctacagcatggtgccggtgataggaatcgaacttataactttcacatgaggcttcggcaggtgcgcattgtgccgtacttggggatcaggaggtaacctagatcttgcccatcctgtacacaccgcgtgcctggtaccgctgtcacggcgacggtccgcattggtttgcgtggctccaaagatcattttctatcgcctaggcgaactaggtgccaaggtgaggacagggacatgatgatgagtgcgcagacgcacaagaaagcgcctccaggggaggcaggcgtgggcattcaagtcaaataagcagaggaggcgagcaggcaactgttcacgggatcacatgatgccaacgtctgccgcactctcgaaggatcgtgcggggaaaatggtccgctacagcaacgccgagcgggaattgatcccgctctacgccggaggcgcagagccgggagggaggcttgggtgatgcttggtaggtggggatgtgcctaccgcagatacacgggctgccgcaggtggggcgtgtgagccatccatcaaaaacattgcattgtcacggggtgtgcacgtgttgttgttgtgtgcggggatgcgtctgtggccaggtcagtgttgcttgggccagaacgggcctatgaagggatcggtggtgaagtcatcggttgttcttggtgtcgttctgcggtgtggcagtcagtgccagcaggttgaggcagcagcgagaggctttgctcctaggacgttcgggaagtactgcatgtcagccctctggttgtacagacggtggtgcagtgaacggcactgccttagctgtaggacgatggagggaatgggagcgacttcgggcgatgctggacccagacgtggtaggggctggctgggtaaaggtcggggctaggcgttgggcacggcggaagcagcgactggctccgggggtggggatgcgggattgagggcgaagtagctcactttacctatcggccccttggcaggatgggtgtaggccaagcgtaggtgctctgcgtcgtaggtgatgtggtttcccaagcagctctcagcaaggcgtgggtggtggctatgtagccagacgaagtgctttttcgtccaggccaacacagctctgtgaagtactcggtgatgaaatcttcggtcgctcttgtagtcgttcccccgtataacagcaagcgccagcacgttcaggcagaagcggagaatttttgctcgttcgacgttcgggaagcgctgcatgtcagcaatctggttgtatagaaggcggcgcagcttaaacgccaccacctgacctgcaggacgcttaaaagcaccgtagtgaaacagattactccacactgagttgtgctgaattttccattccagctgtggcaatctgacttccgaagcgagggagatcacggtgaaaatcatgttggcgatgcgatcgcagaagatcgctcgcgaagagtcgtagcccgctctcacacaaatgcaaacatgctcgggaacgccctcctggtcgagaatcctgaccgcgtctttgatgaactggatcacaagagcaagacggcgtaacacatcgctgtcagcagcgctgctaggttcgttcaaggtggagagatcggaggcagcagatgcgatgtagcccatggcttgagacagcacgaaagaatagcctcgatacccttgtttggcgtagctacgcaaggtcatcaacaccacactgcagtaggcaagccactgcacaaagtcccatttattcctggcgtctctatcgtggttaaagagagtcccgatggtctcaaccatctcatagttggcgaacatcgcctgagtgaagggcttgtggtcaccgattagccccaatgcgcaaccattagtttcgtgatagagaaaggagtccttgttagccagtgcctcatggaagatgttctgggcgaagacccgtatcgggatgccgtatttcttggtgttggcgattgcttggaacagggcaaatgccgtgcgtggtgactccgcgacaatggcacggcacagccttttttcagcgatgagtagcaatagggcgttggcgtctctgttcacctgcgggaggtcctcctgctcctcttcttcacactcaatacgctcaccgttctgcaggctgtacctgttggtggcatgttggaccagtgcctcggctgagtggacgagttcgtcggcgatcactgcgagttctgtcggggagccattgagaatgatgcgatacagggtctgctgaaagcgtgcggcgttgtactgaccgtaggtcggtggccggatgaagcctaaccaggcccaggtcaggatggtcagcaggaatgcgccgccaaggagggcttgccacactgccggggtgagcaggatgccgcgcggcaccagccactgttcggcacgccatagatcagtcagcagggtgagtaggccaatggcagcgacgacgtaaaagctcatgcgcagcagtgggaggggagccacttggatgcggaagcggtagcggacatcggcaatcgtccaggccaagaccatgagtgccaggccggcgaggaattcggagaagccaaagaatgtctggccactgccatccagggggatgaagcagacaccgatgaagcagtgttcggttgtcacggtgaggttctctttgtcggtgtcggcggcgtcatgcacctgatgccgcttcgggggcaaaccgcaaagccatcagggcagccgctggggctgccttggtcattttgaggtggtgccggagataggagtcgaacctacgaccttcgcattacgaatgcgctgctctaccaactgagctacaccggcaaaaacgagaatgtcgctacatcatggctgtactgggtcgccttgacagggcgctgctctgtttggtgtgggcctcaggggcgcggcgcatcaggatcagggcaggatcagggctggggatggactgtagcaagtgtgcgacagtggcgcaaaggtgggattttaggatgggtggttgtggcgggtcaacggcgcggggcacgggcaatctctatgtagccgttgcaggtgcggtgtggagaggggaaggcgcagtggtgctgctgtgggtctggatgcggggacgggggtagcgctcagcaggcatagaattgctcatacaccgtcactccatcgctgggggcggaggggtggcgcggtcacgcctatgtggtgcttgttgctaatgactcaggcggggtcactggcaggggcgctgtggatgaggagggggcgctctatgctgccgtgctctatcggcaggtgttcaatccagtgtgtttaatccacgagttgcaggcgcagtgctttggggagggcaaagaccatggattctggtttgccgctgtgttcggagacgctggttgcgccaagttcgtagaggcgtgctaggacgccgtcaaccaagacttggggggcggaggcgccggcggtcacgcctatgtggtgtttgtcgatgacccaggcggggtcaatttcggcggcgctgtcgatgaggtaggaggcaacgccttcgcgttgtgcaagttcgctgagtcggttggagttggagctgtttggggagccaacgacgaggactaggtcgcattcgcgggcgagttcgcgaactgcatcttggcggttctgggtggcgtagcagatgtcattgtttttgggtccttggatggttgggaagcgttggcgtaaggcgtcaatgatgttgcgggtgtcgtcaacggagagggtggtttgggtggtgtaggccagatggtggggttgggcgacatggagggtggcgacatcgtcgatgttttccactaggtagatacggccggtaccgcgctcttggtcccattggcccatggtgccctccacttctgggtgtccggcatggccgatgaggatcatgtcgcgtccagtacggcagtggcgggcgacgtctaggtggactttggtgacgaggggacaggtggcgtcaaagacttttaggccgcgttgtgcggcttggcggcgtacggcctgggagacgccatgggcgctgaaaatgacggtggcgccatcggggacttggtggagttcttcaacgaagatggcgccgcgttgttttaggtcatcaacgacaaagcggttatgaacgacttcatgacggacgtagatgggggttcccagcatgtcgatggtgcgtttaacgatttcgatggcgcggtcaacgcctgcacagaagccgcgcggattggcgagcaagactttcattgcgtggtttccatgggatggtggggtgcggtgtcaggaagggggtaggaacggaaattatggggtttttggggagtgtttgctgtcaaataggctcagtaggccgatgccgatggctccggcgacgatggctgagtctgccaggttaaaggagggccagtagtgggaaccgacgtaccattggataaagtcgacgacgtggccatggaggaagcggtcaatgacgttaccgatgcctccgccaataatcagtgcatagggcaatgcgctgcgccattcgcggcgtggggtacgggagagccagaaggtaagtaggccgctgatgccaagggctaatgcaatgaagagccacatttgccagccgccggcgtcgctgaggaagctaaaggcggcgccggtgttgtagctgcggtaccagttccagaatccatgaatgacggggacggggatgtattcagggaggctggtgagtacccaagctttggtggcttggtccaatgcaatgatggcaatggaaagcagtaaccagatcagggcgttggggtgggtgggtctggtcatggtggtcggtcgttgtggggctgggatgtggtggtgtgttgcgaaggtgtgcgggtagtcacccggggtgggtggtgatgcggtctgaggtggcctgttgctgtgggcagggatgccagtagggatgttgttgagtgcaaaggtgtcttcagaaccaatggcgctgttctcctggtccgtcaacgttggtgacgcagcgtccgcagagttcgggatgggttgggtgagcgcctatgtcggcacggtaatgccagcagcgggcacatttggctttggtggttggttgggcgctgacaaagaagccatcggtgttggccggggtaacggtgacatctccactaataaagaggaagcggagttcttcggtgagtggttgccagcgggcggcggtgtcggcatcggcagcgatggtgatttctgcttctaatgcggcgccaataacgccgttggcgcgcatgggttccagtactttggtgacgtggtcacgcaaggtaaggagtttgtcgaagtcggcagcggtcaggggggcgttgggtggtaagggggcgagaccgtcgtaccaggtggtaaagaggacgttgtcggcgtggtcaccgggtaagtaggaccatagttcgtcagcggtgaagctgagtatgggggcgatccatcggacaaaggcggcggtgagatggtacatggcggtctgtgcggagcggcgaccgggggcgtcttcgcgcattgtgtagagacgatctttggtgacgtcgaggtagagtgagccgaggtcgacgctgcagaagttcaatattgtttggacgatttcggcaaagtcgtaacgggtgtaggcggctttgatggtctgttggagttcaaaggcgcggtgaacgatccagcgatccagggcgatcatgtcgctcaggggcacgaggtgtagggtggggtcaaagccatgcaggttgccaaggaggaagcgggcggtgttgcggatgcggcggtaggcatcggtggtgcgcttgaggatctcttgggagagggacatttcgttgctgtagtcggtggaggcaatccacaaacgcaggatgtcggcgcccaatgtcttgatgatgtcctggggttcgattccattgcccagtgatttggacattttgcggccgtgttggtcgacggtgaagccgtgggtcaggcattgtttgtagggtgcggcgttgtccatggcgacgccggtgaggagggaggattggaaccagccgcggtgttggtcggcaccttcgaggtagaggtcagcgggtttagggaggccgcgctcaaggagcactgcttcgtgggtgatgccggaatcaaaccagacgtcaaggatatcggtgattttttcgtattgatcggcttcagtgccgagtaattcggtttggtccagggagtaccagatgtcgacgccctgttgttcgacgcggtcggcaacttggcgcatcaatgcggcgctgcgtggatggggtgctccgctgtgacggtgtacaaacaggggaatcgggacgccccaggtgcgttgtctggagatggtccagtcggggcggttttctatcatgctgaggatgcgggcttggccccactggggataccaggtgacgtgtgtgatggccttgagggcggctgagcgcagggccgcttgttccatagagatgaaccactggggggtggcgcgaaagacaatgggggttttgtggcgccagcaatgggggtagctatgatgcatttcagcggcggcaaggaggacgccacggaggcgcaaggcgtcgacaatcagtgggttggctttccagatatgcaggccggccagtgttagttcactgaatggtggggttgtcgggaggtagacgccgcgggcgtcgacggggttgagttcggcagcgctgtagtgattgagtaatccgtattgttgaaagacttggtggtcttcttggccgtggccaggggcggtgtggacggcaccggtgccgtcttcggcggaaacgtggttgccaagcagtagggggatggtgcgatcgggataaaacgggtgggccaagatgtgctgctccatggcggctcctttggcgctgccatggatgagcagttcggcgatgccgtagcgtgccagtgctttggcggcgagtgcttccgccaggatgagccagcggcgctgaccggagtgggtcggtccttcaaccaggacgtagtccagggttggcccaacagagatggccagggaggcggggagtgtccacggggtggtggtccaaatggggacggcaagttgtacatcaggggggagtgtggcgttgaatacggctgccagggcgctggggtccagggcaggataggcaacgtccaccattggagaggttttgtcggtgtattcgatctctgcttcagccagtgctgagccacaatcaaagcaccaatgcactggtttggtaccacggattaagtggcctttgtcaacgattttggcaagggcgcgtatttcatcggcttcaaagcggaaatcaagggttttgtagggggcgtcccagtcaccgatgatgccgaggcgtttgaagtcgcgacgctgcaattggatctgttcggcagcgtattcacggcatttttggcggaattggacggcatccaaggtcacgccgactttgccgtattttttttcaatggcaatttcaatcggcaagccgtggcaatcccagccggggatgtagggtgcgtcaaagccatctaggtgtttggatttgatgatgatgtctttgaggattttgttgacggcatggccaaggtggatctggccattggcgtagggtgggccgtcgtggaggaggaacagggggcggcctttggcatgggcgcgcagttgtgcgtagaagtcgtcacgttcccaacgctcgaggatggccggttcacgtttggggaggtcgccacgcatggggaagtcggtcgcgggcagatgcagggtggttttgtagtcttggctcacgcggtagctcgcaatcgatgttcggaaaggatgtggcgcgcctgttgggcgtcacgatgtatttgtgtggtcattgactggatgtcggggaatgtctcttcgtcacgtagtttggcgatgaattcgacgtcgatacgacgtccatagaggtcactgtggaagtcgaatagatgcacttctaggagtggttccacgccggcgacggtgggccgggtgccgaagctggagacggaaggccagggttgttcgaagatgccatgcacccaggtggcataaatgccggacagtgcgatgggatgggggaaacgcagattcgccgtcgggtagcctagggtgctgccaagctgctggccgcgcacgacgcggccaccgatcatgtaaggtcggcccagtagttcggccgcatgagcaaagtcgcccgctgccagcaaggcgcggatttttgttgcggagatgcgttcattattcaggtgtaagggtgggatctcggtggctgtaaaaccgtgctccaggcccagtcgctgcaataaggcgatatcaccgctgcgctgatgtccaaagcggaactgtggcccgatcagcacttcacgcactcccaagcgtccgagcaaaacacgctcgacaaaggtttgagggctcatggatgccaagcggctgtcaaaacgtagtaagccgacgctgtcagcaccgaagcggtgcaggccctgaattttggcgcgtgtcagggtcaaacgcgggggcggggtggtggaggcgaagtattcacgtggaagcggttcaaagctcagggcaacggtaggcaggtgcaatgcagttgcacgttgtaaggcatgacgtacaagggcacgatgacccaggtgcaggccatcaaaagcaccgatgcaggttacacttccttgcgggaacagcatcccgccttcgatatgtctaaacacgctgcccattaatcaatcccaaaagcccggatgtggtgatcgccgggcgtggtgatgcgtcgcttttaggaagtataactgggcttctgcaccagggccgaggagcgtcacgcatttcgtttgggcaggctgggggatgatgttgccaacgtagaggggctgcaatggctcaggcactggggcgcaggtgacgcgggcgccatcccaggaggacttgagtcgccaggtaggtccctccccctgcactcaccagaatcgccaaccaacccatcttttgccaacggtccatagtgacgaaatcggttcgccagtgcatcagtgccagtaggactgcggccattgcggcacatgccagtgtcagacgtagcatgtatggcctccaccctggggagtgagtgtagatgttgctgcggctgagccaataccagagcaatccaagattgaggtaactggataaggcgctggcaatgcctagggccagatgcaatcccggctgttgccccagggcggccaggatgccctgggcttgcaggacgtcgggcaccatcagctggtacagcaatgctaggaatgcaaaattcagcagcatattggtaagcaaggcagcaatgccggcacgcactggagtcctggtgtcttggcgggcgtaaaacgcgggaaggaccactttgagtagtgcgaaggcaggtagacctaaactcaatccatagactgaaagggcggtcatgcggacatcaaaggcggtgaagtgatggtactgaaatagtgtggacaccaatggctcagccagcagcaataaagccagcatcgccggaactgcaatgagcaaggtggtgcggagtccccagtccaaggcattggagaagctggcggtgtcggtcttgacgtggtggcgtgccagggtcggtaagatgacggtgcctaaggcaacaccgaagatacctagtggcagttccagaaagcggtcagccagtgacaaccaggtctgggagccgtcgctcagtcgggcagcaatgaaggtatccattaacaagttgatttgagcaatggaagaaccaaacagggtgggcaccatcagtgtaaggatttttcgcacatcaggatgattccagctccagcgtggcagggtgagcagatcgatacgacgcaatcccggaagttgaaacagtaattgcaggatgccagcagccaatacggcccaccccagggccaggatgggcacttgcagtcgtggtgccagccacaaggcactgctaatcatgcacagattcaggatcaccggggtcagggccggcattgcaaaacgctggaagctgttcagtgcaccgcttgccagcgcagtcagggaaacgaaaaacagaaatgggaaggtcagccgaaataattccgtcaacaatccctgtttcgccgggtcagtattggcgccactcccgaatagccaagccaactggggtgccaataacagtcccaatgctgtcacgaccaataggacgccacccagggtgccagaaacccgtgccatcaatgcgcgtagatcagtgtgtgagcgggtctctttgacttcggtaaatacggggacaaaggcagtcgcgaatgagccttcggcaaacaggcgacgcaggaaattggggacacgaaatgccaccatgaaggcatctgtgacggcattggcaccaaactgggcggaaatcacttggtcgcgcaccaagccaagcacacgcgaaatggtggtcatgctactgaaggagagcaatcctcgaagcagatggggcttgctcatcgtggactcctgtgtacgtggagcttgacgtagatattcatgaaaatcataattatcggcctaatttttcatcaatggatttctgaggaaagcatttctgtggccaatatcaagtccgccaaaaagcgcgttaagcagaccgttgtgcgtaatgaacggaacacggcgcagcgttcgatgttgcgcactgccgtcaaaaaagtaattaaggctctcagcatcaaagatatcgctggtgccgagaccgctttcgctgttgcccaaccaatccttgaccgtttcagctcccgtgggttgattcataagaataaagcggcccgccataagagtcggttgacggcccgtatcaaagcgctgaaaaccgcctgatgcggtgacgcagcagggagcgatgcatcgcactggccgtaggtgcctatagaatagggtacggccagtttgactgatgaaaagccacatcgctctagggcgctttccctgcctcatctgctgcttacgctttgctcagcggccacctcacgctgatgctcaaaaagtgtcattgcactcttcataattggccaagtcccttcacggctcacagcagacacaaggtaccagggcgcagtccaatgaagctcggcaatcagtgcctctgctagggcctgggcctcttcctggggcatcaagtcagccttgttcaacactagccagcgcggtttatccagcaatgctggatcatggcgttcgagttcgatttcgagtttacgaacctgctcaatgggtaataggcctacccccactttttcgttaccgtaagcatcagcggttgcggaaatgtccaccatatgcagcagcaacttagtacgctgcaagtgacgcaggaactgcgtcccaagccctacaccatcagcggctccttcgatcaaaccaggaacatcagcgatcacgaagctgctgtaggcttcaattttgaccacgcccaggttgggatagagcgtggtaaatgggtagtcagcaactttcggggtggcagcagagactgcacgaatgaaggtgcttttgccaacgtttgggaaaccaagcatcccaatatcagcaagcaacttgagttccagtttcaaggtacgctcttcgccctgctctccaggcctggcttggcgtggagcacggttgatcgagcttttgaaatgcatattgcctaagccgcctgtgcctcccttggccaccagtaagcgatcaccatgacggaccatatcgccgatgacctcatccgtctggacattgatcaccacggtcccaatcggcacgctgataattttgtcctggccagccttaccatacatctgctggcccattccattcacaccgcgttgcgctttaaaaatgcgttcgtgacgaaaatccaccagggtattgaggttttcatcggcaactagccagacgctgccaccatcacctccgtcgccaccgtcaggaccaccaagagggataaatttctcgcggcggaagctaacgcaaccgtctccaccgtttccggcgatcacttgaatttctgcttcgtcaacaaacttcatggaatacggattcggaattggaaagcaaaagacgatggaagcaggcagtttatacgtacagaaccgcacgcaaacacgtaacaggtggacagagaagacaaagccccgctctatagcggggcctctttagccgtgaccagttctacacgtcgaatactacgggtttgagatttacgctggaatgacgttaacagtacgacgctttttcgggcctttgatcgaaaacgcaaccgtaccatccaccaatgcgaataacgtatggtcgcgccccaaaccaacaccatcacccgcatgaaactgcgtaccacgctggcgaataataatgttcccggcttcaatggcttgtccaccgaagagtttgacgccgaggtatttcgggttagagtcgcggccgttacgcgaggaacctacgccttttttgtgtgccatgaaaaattcgctccttttatcgattactgcttagcggggccggagataccagtgatttggatttccgtgtaatactgacggtgcccttgatgcttcatgtgatgcttacgacggcggaatttgatgattctcactttacgggcgcggccatgagccacaacctttgcagtgacagaggcatctttcaaggcttcgcccacgtggatgccatcgctactacccatcaacaggacgctgttaaaagtcacatcgctcccagtttcgacatcgagcttttcaacccgaagcgtctccccctgaacaacgcgatattgcttaccaccggtgaccagtactgcgtacatgaccattccttcctttttaatgtcgttattgtggtcgctgtctccagaatctggacagacagaagggcacaaatgctagcgtttttccgaaaaaaaggaaagaagtcgctgtgtttcagtcaagctcagacatggggctacacatgtagagttgagggtttccaatggcatttggcatcctcaacgttcgatttggattcaactcattcctctaggcagttgatgatggagggcctaaaacacgtggagaatttctgcaactcatcattcattatgctttccaatctaaactatcatccatcagtgccccgccactgacctgcattccggataccccatcgtgacggccctcatccgtatccgcggcgcgcggacacacaatcttaagaatctggatctcgatctaccgcgtaacacactgatcgtcatcaccggcctctccggctctggcaaatcatcgttggcatttgacacgatctacgctgaaggtcagcggcgctatgtcgaatcactgtcggcctacgcgcggcagtttttaagcgtgatggaaaagccggatctggaccagattgaagggctgtctccggctatttcaattgaacaaaagtcaacctcgcataatccccgctccaccgtcggtacgatcaccgagatctacgattatttgcgtctgctgtatgcacgtgtcggacagccgcgctgcccggaccatcattacccgctggaagcacaaacagtgagccagatggtggatcacgtattgaccttggatccagagcagcgctacatgctgttggcgcctgtggtacgtgagcgcaagggtgaacatacccaagtgttcgaacaactgcgtgcacaaggctttgtgcgcgtgcgcgtggatggcgaactgtatgagatcgacgtggtaccaacactgacactgcgtcagaagcatacgattgaagcggtcattgaccgttttcgcccacgtgaggacatcaagcaacgtttggcggaaagctttgaaactgcattgaagttgggcaacgggatggcttcggtccaaacgctggacacaacaacaaccacaccacacctgttttcctccaagtactcctgtccagtatgcgattattcgctaccggaattagagccacggttgttctccttcaacgccccgatgggggcgtgccccgcgtgcaacggtctgggagtcaccgagtttttcgacccggccaaggtcgtcatacatccagatctttcactgtcagctggtgctgtgcgtggttgggaccgccgcaacgcttactattttcaattgatcgcttcgctcgccaagcactatacgttcgacattgacgcatcatgggaatcgctccctgaagagatccgtcataccatcctgttcggcagtggcgatgagcagatcaacttcatctatttgacggaggctggagggcgtaccaagcgcaaacatcgctttgaaggcattgtgccgaacctagagcgccgctaccgtgagacagaatccgctgccgtacgtgaggaactggccaagtacgtcagtacgcggacctgcccggagtgcggcggcacacgtctgaaccgcgccgcacgcaatgtatttgttgccgatcggacgctccctgagctgacagtgctgccaattaatgacgcattggaattctttaaaacgctacgcctgccaggctggcgtggtgagatcgcaattaaaattgtcaaagaaatcggggagcgtctcggcttcctggtcgatgttggtctggactacctaacattggagcgtaaggccgacacactctctggtggtgaagcacaacgtatccgcctagcgagtcagatcggtgctggcctcgtgggagtgatgtatgtgctggacgaaccctccatcggattgcaccagcgtgataacgaacgcctgctcggtacgctgactcggttacgcgaccttggtaatacggtgattgtcgttgaacacgacgaggacgccatccgccaagccgaccatatcctcgacattggtcccggtgccggtgtgcatggcggtgagatctgtgctcaggggtcgttggaacagattatggccgcgccgcgctccttgactggccaatacttatccggtcgacgccggattgaaatccccaaacagcgccacccccccaacgccacgaagatgctgcacctgcgcggcgcctgcggtaataaccttaaaggcgttaatcttgacatccctgaggggctgtttacttgcattactggggtgtccggctccggtaaatcgacgctcatcaacgacacgttgtttacgttagccgcaaacgagatcaatggtgcctctcatccaattgcgccgtatgcgtcagtcgatggtctagagctgttcgacaaagtggtagacattgatcaatcaccgatcggacgcacgccacgctccaacccagcaacctacaccggcatgttcactccgttacgcgagctttttgcgcaggttccggaggcgcgcgcgcgcggttattctccagggcgtttcagcttcaacgtgcgcggcgggcgctgtgaagcgtgtgagggcgacgggctgattaaggttgaaatgcactttttacccgacgtctacgtgccatgcgatgtatgtcatggcaaacgttacaaccgtgagacgctggaaatacgatacaagggatataacatcaacgacgtgctggagatgaccgttgaagatgccttaaaactgtttgaagcagtaccagcaattgcacgcaagctggaaactttggtagatgtaggcttgagctacctcaaactcggccagagtgcgacgacgctatcaggcggtgaggcgcagcgtgtcaaattgtccaaagagctgtcacgacgcgacaccggacgcacgctgtatatccttgacgaaccaaccactgggctgcatttttacgacattgaagcgctgctagcagtactgcacaaactgcgcgatgcagggaatacggtcatcgtgattgagcataatttagatgtgatcaaaacggcggattgggtcattgatctcggcccagagggaggcggacgcggtggtgaaatcctggtggccggcactcctgaagcggtggctgcgcatcctcactcgcatactggccacttcttagccaagctgttacctcctaaggatgtatccaactgcggtcatcgggaccccggagaagaggttgacatcgcacaaacggtacaccgttagacaacatccacgatgagcgttgcctgcctccaaacgtgatttacttggttagcgctgccagacaatccgagacttggcagcacaacgagggaatgacgatagagaagccaagcaccattgacatcacagaatggctctcagatgggggaacacttccgtcgcagccacacctgagttatctaacatgaccttgatcctatgcaggagcattttgatggtgggccattccggtcttgatgaaatggcctgcgcttgcaaagtcattagattagcttgcaacgtgtggtgaatatcttgtaagagagtcccttcgtcgatagctttacgcagacatccgatcaacggcaacaacgcgtcgatgtcttccaccgtgtgagtatgagtatgggcctcatgagaacccatcgccccgatttggtcagtggaatttttaacgcctccgacgttaacagtatcgtttttcacaatctgcttttcctgcggcgagaagagccttcccttgccaagcacccccttagcctccagattgagtgcccattgcagcaccttgtcccgcaccttttcgaggattccatacgcctgtaggttcgataacacgcgcaccagacgcacatcctctccgaaggaacgtcgcatcacctctggcaaccggcactctaactcagggtggaaataactgaagctcgtccccggggggtcctgagtcatctggatcagcacatgaaccgactgctttatagggtcttgagagacctgtttagcaatcttaggaggaggaaagaaaggaacccggccattgtctggatcctcgaccatccactgcaaggatacccgccgatagtcaggaacgtcatcggaggagtagccgttcagttctctgttgatccatgccaccaactcgggaagttccaagcgcgaggcaaccaccaacgccaaacgcaacaaatgagccaatgacacagtccgatcaatggccgcatccactaattcattcaccagcactttgctttcgtccatgatcatggcaaccgtcagggaactagatgcacattgtgccatcgttacttctcccaaacacggccatcatctgcaacaacgcaatggcaagctcactctggttaaccttatagtgaatttctgtgggcaaccccgcagtacaggtgagctatctgtacagtaacgagtcagctatcacctggtgatgcaatttgtctttttattgctgtcttccccctacgtacttaggtgcatggggtatgggcgctgcagcaatcgctgtcagcgatcacatgggatagcaaacatcctcgtatctcacccgtcctgagcgataacgcagcaagcgaatcaacacagccggtgaatgatgacgcactgcggacctgtaccatgtccagccgtccgacattgaccacggcccagcactcggtcaacccgcaatgtcccagcttttgcttttctcgaccgctgcaacgcagttgttgatgtgagagatctgtgccctacgcttcccttctcacaccatagggtgatggcgaaggtcacactcagcctctgatgagcaggctcaagagaaatcgatctgtttgccgaaacccggacgccaccactgtaaaaacatctgatccagtgcatcccgctcacgctcatctgcacagcacgccttcgccaagccgaagagagttgagatacgcgccacatgctgctcatgcgtcggctcgccacggacctgaacggaattgctgatggccatgactctttcgcataaagacctcggcagcccctcttctaaaagactgaaatccatgattaggttctcacgccaaatcggcggaatgacccgaagaatcaaccgatgcaatacgcgatcccgagtcacaatcgccggtatcccctcaaagcgatagccgtgttggcgcaacacgggtaaggtgagccatagattgagatcaaacgcgcggtttcgtagataggggacattcatataatcagtctcgtccttccaccctggctggaaagcgagaaacgactctaggtaagagaacgcaggctggggatcgtcagtgagcttgagcgactgctgggccttcaacaacgtccccaacgctgtcaacgtgatcagcgggccggatcttggaatgtcctgctgcacgatgtgctcaagacgctgcaacacctgctccgcagggagctgttgtgccagcagcgacttcatcatcgcgacgtagggaacaaccaggctgcaatggcggcttagtactgcagcgttgttacgcagcaaacgcacctgctgctgtgcatactgctcgcggaatctcatccctaactttgccaacttttgaatcatggcctcaatgcgattcgtaggcgatgctctaaattgcgggttagagagccactgttcctgcaatgcaaaccaaggattgatgacactccgcgttcgaatgtattcgggcaactgcgcgtaccactgcacattggtcagcgcgttcgtatccaggaagagttcatagcaagaagtgtctttgtcagtgcctttggcaacattgagaaacggccatatgacagcagtaccaccctcaatgaaaatacaccgctcagcgtaaggcacgattgtgttaacgatgtgcatgtgctgtcttgatgctttttttaaacaagaagggaaagaagggacacgatttcactcccactcaatcgtcgctggcggctttccggaaatatcgtagaccacgcgggacacgccgcgtagttcattgatgatgcggttggagacggtactcaggaagtcatacggcagtggcgcccactgtgccgtcatgaaatcaacggtctcaaccgcgcgcagtgcaatcacccattcatacgcacgggcatcaccaacaacgccgactgatttcaccggaagaaagactgcaaaggcttggctaaccttgtcgtacaggtcggcttgatgaagttcatcaataaaaatcgcgtcagccttggccagtaactcggcatactccggcttgacttcaccgaggatacgcacgcccaagccaggtcctgggaatggatggcgatataccatggcatggggcaggcccagagcaacgccaaggcggcgcacttcatctttgaacaattcacgtaatggttcgaccatacccagggtcatctgctccggcaagccgccgacgttgtgatggcttttgatcacgtgggctttgccggttttgctgccggccgattcgatcacatccggataaatcgtgccttgtgccaaccatttggcctgctttcgtttgcttgcctcttcctcgaatatctggatgaacaggttgccgatgattttgcgtttggcttctgggtcgtagacaccttgcagtgcgtcgaagtaacgcgatgccgcattgatacgtaccacgttgacgcccatatgttccgcaaacatggccatcacttggtcgccttctccccagcgaagcaggccagtatcaacaaatacacacgtcagttggctgccaatggctttctgtaagagagccgcgacgacggaagaatcaacgccaccggacaggccgagaatgacttcatcgcaaccgacacgttcacgcacatgagcaatttggtcttcaatgatgttagcagcggtccataacatctggcagccacatatatcaaccacaaaacggcgcaataaagcctgtccctgtaaggtatgggtcacttccggatggaattgcacgccataccagcgcttatcttcgcgactcatcgccgcaatggggatgcggtcagtggcggctgtaatggtgaagccgggcgggacgcgtgaaacatggtcaccatgactcatccacacatccagacggaactcagagggatgatcggacaagccggaaaacaaggtatccgggtaaatcacctggaccgaggcatgaccaaactcgcgtttgtcggctgcctcggtcgcacccccaagatgtacggccatggtttgcatgccatagcaaataccgaggattggtaagtcactatcaaagacgtgctgcggtgctgcaggcgcacccggggatgttgtcgattcagggccaccggagaggatgatacctttggctccgaagctcaaaatctcttcaggggagtgatcccagggccacacttcgcagtagacaccaatttcacggatacgacgggcaatcaactgggtgtactgtgcgccgaaatcgaggataagaattttgtcgtgatgaatattcggcgtcatagcaggtggtccagtgacaggaacgcagcgggcgctggctcaataaaaaacgcagtaacgcggcacataagagatcaggcaagccgtagatcaggtaagcaatgactcgagaaagatagccgtgacagcggcccccacaaaacgcaacaatacaaaatgccacaacgtttgatacggatgacgaccaacaaggtcacgaaaggcaggcagaggctctgtggggcatcactgaggctcagcgcatccgataattcggcggctctttggtgatttgcacgtcatgaacgtgactctcgacctgaccggccccagtgattttgacaaactggggtttggtacgcatctcttcgattgttgcgcagccaacataccccatggtggcacgcaagccgcccatcagctgatgcacgatgccactgactgaaccacggtaagggacgcgcccttcaatgccttccgggaccagtttatcaacgtcgctcgcttcctggaaatagcggtctttggagcccttttccatcgccgccaaggaacccatgccgcgatagcttttgtaagtgcgcccctggaacaactcaacatcacccggggcttcctcagtccctgcaaacaaaccaccgatcatgacggttgatgcgcctgcagctaatgccttgccaatatcaccggaatagcggataccgccgtcagcaatcagcgggatgcgatcttgcagcgcgtcggagaccatctgcacagcggtgatctgcggcacgccaacacctgccaccattcgcgttgtacaaatggagccgggaccgacacccactttcactgcatctgcaccggcatccatcagtgccaaagcagcatcaccagtaacaatattgccgccaatcacttgtagttgcgggaagtaacgcttgatccaagccacacgatcaagcacaccctgagaataaccatgcgcagtatcgacaatgatcacatccactccagcagcggccaatgtctcaacgcgcctttcagtctctccccctacacccacagcagcgccaaccagcaagcgggtcaccgcatctttggctgcgttgggatagtcggattttttttgaatatctttaacggtgatgaggccgcgcagttcaaaagcatcgttcacaaccaatatcttttcgatgcgatgtttatgcagcagttggagtacctcttgggagtcggccccttctttgactgtcaccagggcttcttttttagtcatgatatggcgcacggggtcatcaagctcgctttcaaagcgcatatcgcggtgagtcacgaggccaattaattgacctttatcgacgacaggcacgccagaaatgttcttggcacgggtcagtgctaacacatcgcgaattgatgtctctggatcaactgtaatcggatcacgaatgacgccagattcgtatttcttgactttagtgacctcagcgacttgctgttcgatggtaaggtttttatggatgatgccaatgccgccaagctgcgccataacgatcgccaaacgggcttctgtgacggtgtccatcgccgctgaaaggaccggcaatttgagcctgatattgcgtgtcaaccgggtttcgaggttgacatccttgggcaggacggtcgaatgggaagggacgagtgaaacatcgtcgtaagtcaaagcttcggccaagatgcgcagcatcggcagatccgggagagttttaggtaatgcttaattttacgccgaaatctctcggatcgacactcacggcctatgtgaatgacaccttgcaacgtgcgcatgccacaactagggaatcaacaatccgccgcttcggcggcttccagggtgttttgcatcaacgtcgctacggtcatcggtcctactccgccaggcaccggggtaatccaactagcacgcttgactgcactctcaaaaccaacatcacccaccaaccgaccatcatcaagtcgattaatgccaacatcaatcacgactgcacctggcttcacccactctccaggaatcactcccggacggcccactgcaacgatcagaatatcggcttgacgcactgctgcttccagcatctgtggtggggtgaatttatggcaactggtgacagtacaaccagccatcaacaactccagtcccatcggtcggccaacatggttgctcactccaacaatggtggcattacgccctcggaccggtcggtcggtatgaccgagcaaggtgacaataccccgtggcgtgcatggtctaagaccaaactcacgcaatgctaagtgcccaacattttgagggtggaaaccatccacatctttgcgcgggtcaacacgctgaatcaatcggtgcgcatcaggaatgcccggcaatggtaattggatcaggataccgtggatctttggatcggcattaagccggtcaatcaacgcggccaactcagcctcagtcgtcgcttctggaagatcgaagtcataagctttaatccccaccttctctgcagcacgccgcttgttgcggacatacaccactgatgctggatcggaaccgacaagcactacggccaacgttggaggcagtttacctgccgccacacgtgcatccacgcgtgttttcaaagcatcaagcaggtcatcagcaatacgacgcccgtcgaggatacgagccaaatcggtggctgccagcatagatacgatcacaccaaagataaaatattttgtcgcccattgtggcccaattccttcatgactgacatccctgcaagcgatatcgccacctaaggtcagaacgtagcaaaacgcagaacaacgggattctgaaggaacttcttaggtcccaagcagcctggaggtacgtcgtccaaaaaaggacgacgtacgctaagcatctttacgcaaaccgaagcaaacactgataactagttcttgtcgaccgggagcaatgtgtcacgcagtatctcacgcaccgcctggccatgtttcctgtgttcaagcgccaaatgcagggtggcctcaatcagaccaatgtgtgcaccgcaatcaaatcggcgaccttggaagcggtatgcatccactctctcgtatttcagtaattcggcgatcgcatcggtcaattgaatctcgccgccagtaccgatagaggtgttttcaagcatctcgaatatcttgccactcaggacatagcgccccaccacagcaagattgctcggtgcatcgtcgggcttaggcttttcgacgatttgagtaatgcggcccttggatccgtcaaacacatccgttccgacgatgccatagttaacggttttatcgacggggacatcctctactgcaatgacactgctaccggagacttcagcaacatcagccatttgtttcagtgcacctccattacgactccacatgagatcgtctggcagcaacaccgcgaatggttcatcacccaccaccggcttggcgcacaacaccgcatggcctagacccagcgcttccgtttgagtgacgaaaaccgtacgcactccatcaggcaacacatgacgcactaattccagctgctcatacttaccggcacgctcaagcttctgctccaattcatacgctttgtcgaagtaatcggccaccgcatgcttgtaacggttggtcacaaatacaagggtatcgcatccagcctggatcgcttcgtcaaccgcgtactggatgaggggtttatcgataattggcagcatttccttggggatggttttggtcgctggcaaaaaacgtgtaccaagaccggccacagggaaaacagccttgcgaatacgcttaatcattacagtcttctgacctcacgtgctgggaatgggacaactgtttcgaatcttgtttcttttttatgacgtgcagcatggaaatctggcatcaacatactaatcaccgactcaatctcgacagtatcgtaatgttgcaccgcctcacgtagacgcatcaccgactgcaacacttgctcttggggaaacgcgcgtacatccgcctcaaggatattaggatgcgccgtcggtcgatagttttcatcagcataaaaaagcgtttcatgcatcttttcaccgggacgcaatccggtgtaaacaatgacgatatcgcgccccggctgcttaccagccaaacggatcatctgttcggccaacacactgatccgcacaggctcccccatgtcgagtgtgtaaatcgcgccatgcgatgccaacgccgcagcttgcaagatcagctggcaagcttcggagatggtcatgaaataacgagtcacgtctggatgagtcacggtcactggacctccctgacgaatctgctcacggaacagtggcaccacactacctgccgaatcgagcacgttgccgaaacgcacggtgacgaaacgcgtcccagtgctcttagcatcaaagctctgacaaatcatctccgcataacgctttgttgcaccaagcacattcaccggctctaccgccttatcggtagagataaacacgaaagtttgaattttagctgcaacacaatggcgcgccacgttctcggtcgccaaaacattgttacgtactgcctcgcgcaattgctcttcgagcagtggcacttgtttgtaggctgctgcatgaaacaccgcatccggacgcgcgcaacgcagtgcatgagcgatcacagcagcatcaccacaatccccaagaatacggagtacctgaatatcagggaacagtgtgcgtaggtcagaatcaatcgtcagcaacgccaactcatcaatctcaatgatcactacccggctcgcaccgtgacgggcacattgacgacacacctccgagccaatagaaccgccgccgcccgttaccatcaccgtctttccagataaccaactacggatcagacgccaatccggaatcaccggtttgcgattgagaagatcctcaattgaaacttccttcagttcacccggcagggtacggccttcaagcacatcaattagcttaggtaccatccggaacggcaagccagtactttcacacatggccaccacgcgctgcatgccagcagcgtcaagcgaagggatcgcaatcaccagtaatttagctgcagtctcacgagcaatcgtactgacttcttccaaacgaccaagaacgttcaagccctgaattttggcgccacgcaggtacaccgcatcgtcaatgaaaccaacaggaacaaacgcaccagtacggcgcatatcgcgtactagcgcctcagcggcacgcccagcacccaggatcagtacgcgctcagaggaatcgaccgggtgaatcaattggtagtctttccaagcccgatacagcaaccgaggcatcccaagcaatactgacaacgcaaagggataaacaaccaacacagatagcggtaccccctcaaaacgagtgaccgacaacaccaacacaatcacgatcagaccagagaaagcagatttgaagatattccaaagatcagggacgcttgcaaaacgccataaaccgcgatacagaccgactcgccagaaaacaaccgcttgcgcaatgagaacaaccagggtgcgccagtcggcatacggcaaacccggggggtgcaccaacattgagtaacgcgctgcatgtagagcaacccagcacacccaaacctggatcaagtcatgagcaatgacagccaacttaggcacagcgctggccaagcagttacgccaatgaatcatgtattcattcctttagtcgtcacgcaattcatggcgcagaaataaccaaatcaagcaggaaaaaatacaaaaaatcatcgattgcatcgcttcccacttcagtaaagacaaatgtgtaacggcaaaaaacaagacaagggtaaacacactgaaaacgaaataagtaagtgtgacaggggtatgcgagccacagcgtctggcagcacgctgatagacatgctgaacatgaggccgccaccaacactgcccagaaaatacgcgagataacaaggtcaagcctgcatcgacaagaaacgcggtcaaaggaatccaaactatccagacactgatctgcgccttgatcaggaccaacaccatcaatccggctaatgcatagcctaacgcgccgctaccgccgtcacccaggaagatccttgcacgtggaaaattgaacggcagaaaacctaggcaagcagctgcaagcgcccaagccgcccacgctaccagccccggcaagaggagggcataagcgatcgctgcaaccgccgcctgggtggtcgccagaccattaatgccatccatgaagttccagatattcaccaacacaagtgcagccgcagcagcaagcaatgcttgccacaaagttccagatgcagtaaaggtcaacacaccaaggagggtagcagctaaacaatgcaccacaaagcgaataacagccggtattggacgatgatcgtcccaccaaccgattgaagcaatcagcgtaaaaccgcacgcatacagaaccagatggaatcgccactgcggcaatccaaaccaagccaacacacagccaaacagcaaagcaaacacaatcgccataccaccaccacgcggggtcgccacttggtgactacgacgttcacaaggcagatctaacaatcggcgccaaagcgcgtagcgacgcaacaaccacgtaccaaccgccgccaccatcaagtgcagtacaacccactgccataggatcagcattagaccaccgcatagttcagcaatggtttgactgttccccactctttacaacttggacattgccaatgatgcgtcttagcgccaaaaccacagcgcgtgcaacggtaactcggattgcggaccaacagttgatcggtaatatgctttagatcatacaaagacgcgaccggatcacttccgtcagcaagagtcagatcaatcagcgccgattgaccacgtaccgagggcttcgctttgagctggctaccgagataaccacgcgcttgtgctggtccttcctgcgattcaatcagttgggtcattgccaaaacaggggcaataccacgatagtgctctgtcatctcggaaaggaaattacgggccccagcaatatcacccacttgacgataggcgatcagcaacgccggaatgatctccggaagatattcgggatcatggcgcgcagcacgctcccaagcacggaccgcagcctcgtggtgacccaaatcagcctcaatgcgaccttcaatgataccggcacgtaccgaagtcgcatcggcttggtaagcacggctgaccgcttccagcgccctatcatgctggttagaagcacggtaacgatctgccaactcgcattcaaattgagcaataagcttgcccatgggctctccagtcgccacttcatagcgaatcgcattatcgatcgctttctcccaatcacgctccgcttggtagatgctgattaagtggcgtagcgcttgcggtgcacgttgatcaatctgcgcaagttctgtgaagactgtctctgcacgatccagcaatccagacttcatgtaatcctcgcccaacgcaagtaaggcaaacaccttttgatggtcggtcaaatcaggccgcttaagcaatccttgatgcaatcggatcgcacgatcaatctcgccgcgacggcggaacaaatgaccaagcgcaacttgtgtctcaaacgtttccttatccagctccgcaatatgctgaaacaactcgattgctttatcgggttgttcactgagtaagtaattcagtccgcgaaaataagtactggacaatcggctaacctgggcatgcccatgtcgttgccctccccgtcggccaatgacccagccgctcaaagcagccagaggcagaaataagaaaaaccagaaccattcatccaggaattccatagaatcaatgcaatccatcggtaggatgcatatccgcagggagtgaagatgcactacacatctgagccagcgctttatttgctctgcgaagcttggaataagtaggaatcaacgcaaccacgagaaccaaactgctaccaataatcagccctgccagcaaggtaaaaacgataaccatacccaaagtggtacgtacactcgaaaacataaagtctagagtcacttcggcagaattcaaaacgccaatgaccaagcccaccagcagaaagagcaacattatcagaaggcggaagattttcatgagtaacatccaagaaccattaaacaatagcttaaccgatcacaactcgttactcagtgatatctccacattcagctagaggtacaacacttgccacacgttcacgcaattctttgccaggcttaaagtgaggcacatattttccaggtagggcgactgattcaccggtctttggattacgcccacagcgcggtggacggtagtgcagagagaaactaccgaaaccacggatttcaatgcgatctccctcagagagggctccacccatcatttctaataatgacttgaccgccagatcgacgtcatctgacttcaaatgcgcttggcgcttggtcaggatctcgattaattcggacttggtcattggtaaaaggcaaaaaatcacttgacaacgaaaacggtccaggtagaaccacctagaccgatccaatccctaaaatcttacaaaggagaaatcaggagcaccaattcaattactcgggcttattaccgagttgctctctcagcagcgtacccaattttgtagtaccaccggaagaagattgatattcctcaagaacttcgcgcatctcagcatcatctttggctttaatcgacagctgtaaagtacggcccttacgatccataccaataaacttagcttccacactatcgcctaccttcagatactgagtcgcgtcatccacacgctcattagcgatgtcacgcgccgaaacgtaaccttcgattccctcatccaactcaatcaaggcccccttggcatcaacctccttaacggttccaatcaccttggagcctttcggatgagtagccatatactggccaaaaggatcttgttccaactgcttcacacccaaggaaatacgctcacgctctggatcgacagccaacacaactgtttctaaggtatcacccttcttgaaattacgaactatatcttcgccggttgtgttccagctaatgtcagacaagtgcaacaaaccatcaataccaccgtctaaaccaatgaaaatgccaaagtctgtgatcgacttaacttggccactcaccttgtctcccttcttatgggtaagagcaaacgtttcccacggattggcagcaacctgcttcatgcccaaggagatacggcgacgctcctcatcgacatccaggatcataacctcaacctcatcacccacctgaacaaccttggaagggttgacattcttgttggtccaatccatttccgagacgtgcaccaagccctctacacctgcctcaatctcaacaaatgcaccatagtcagtcacgttggaaaccttaccaaacactcggcagttagctggataacgccgcgaaatgttatcccagggatcctcaccaagctgcttcaaaccaaggctgacacgattgcgctcacggtcaaacttcagtacacgaacctcaacctcatcaccaatattcaccacctcgcagggatggcgcacacgcttccatgccatatcggtaatgtggagcaagccatcaactccgcccaaatccacgaacgcgccgtaatcggtcatatttttaaccgtaccggtcaacactgcgccttcctgcaacttatccaacaactgttcgcgctcctcagaatgctcgctttcgaccactgcacgacgagaaacaacgacattattacgcttacgatctaacttaataagcttaaattccagctccttaccttccaggtaagcaggatcacgaaccgggcgaacatcgaccaaagaagcaggaagaaacgcacgtacatccttaatgtcaacggtaaatcctcccttgaccttaccgttaatacggccactgatggtctcattcttctccaaggcctcttccagctcatcccacaccatcgaacgctttgctttttcgcgagacagaatggtttcgccaaagccattctcaatggcatcaagcgcaactttgacctgatcacctaccccaacatcaatctcaccagcgtcattacggaactgctcaatcggcacgatgccttcagacttcaaaccggcgttaataaccactacatcaccacggacatccacgacggtcccagtaacgatggcacccggttttagcttcgccaaattcgcttggctggcttcgaacaattcagcaaaagattcagtcatttgatttactcggttaaacacaaggacggccactcaaggaattctcaccagagacgccgccccccctctaagttaaagtggataaaccgccacgtaccaggcgacggaacctattcgttctacaacacatccttgcctaaaaatcatgtgattaccggaatgccgttgttggacacaatgaaaatgagtattttagagatctcgccctgagaacctaaaccctgcacctcaatcagtcaccagagcaagcacctgagcaacaacctcatcgacttccatacaggtactatcgattaacaaagcatcatcagctggttttaacggtgccacagatcggcaagcatcacgcgcatcgcgcgccctaatttcttccagtaaagcgcccaacataaccgaaacacccttcttcatcaactgtttataccgacgttgagcacgctcctcggccttagcagtcaagaaaaccttatattgagcatctggaaagatgaccgtacccatgtcacggccatctgcaactaatcccggagtgcgccgaaacatctgctgacgttctttcaatgcagcacgcacctcagagatagcagcaattgtcgaggccaacacacccgtcgtctccatgcgcagcacatcggtggcatcaatcgcattcaccaagacacgcatctccccatcagcacacttggcaaaattgacacacgtatcaaacgcgcacttcactaaagcggttgtgtcggaaacatcaacagcagtccagtcagccgccactgcaacagcgcgatacaacgctcctgaatccaagtaatgccaacccaagcgcgcagcaacgatcttactgactgtgcccttaccaaccccggacggaccatcaatagtaaggacaggcacaaggtcagccattcaacccccagggatctaagaaaacaagagattgtagctgcgcctgtttctttacgcgctagctataagcacttgaaaatctacttcaaagacagataggattcatagcattacgttcacgatcacatgatcgcatagtcattttcagggcttagtgcatttggttttgtttaataaaaaaaaatgcatgggcatctaataactcttagcgatattttaaagataaagcgtctcacagaggtgtatatgaaagttctatcctccctaaaatcagcaaagacgcgtcacagggactgcaaagtcatccgccgtcgcggtaagatcttcgtgatttgtaagtccaaccctcgttttaaagcgcgtcagcgctaaagccgggctttatggccgtctgtcctggaaaaccgcctcagggcggttttttatttttacactgcatcaaacaaacgccgatacaccccgtacgtatgtggccaaagcatttcatcaatgtttcttgttgttgtcatcttcgttcaacatcatcgaattgaggaaataaaaacatgcaaaacggccgtattgcctgcacgttgggcgctctactggggatcgccgtcacggcacaagccgaaacgctactgattgatcgcgttaaaattaacccagccgcagccccaatgcggggccaatccatcgcccaggtggaaacccactacggcacacctacacagaaactggagccacgtggtggtcaaaagcggaaatggccaaagattgatcggtgggtctaccctgattacaccgtttacttcgagaaagggaaagtcatcgacagcgtgatgaacagcgtaagtgccgacgaaattggacccaaagcaacgccaacacgctaatggcaaccatcatccccacagcgtggcaaccctttaagagtgaaacaccattgacgacattcccgttccgcttccccgccgagtgggaaccccaatctgccatcctaatcgcctggccgcatgccaatactgactggtctgcacatcttgctgacgtcgaagagacctacattgcattggtagcagcgatcactcgctttcagatggtcatcatctgtgtcttggacgacgacttgcagacctataccgaagcacggctacgttcagcatctgtcgcgatgcaacaagtacggttcaccgttgccagttacaacgacacttggttgcgcgactcaggcccgattactctgatcggaacgaatcgcgatttccgcttactagacttccgctttactggctggggcggcaagttcgaagcgaaagcagacgaccagttggtgagcgtcttgcacgccaacggtcttttcaaaaacacacagatgcacagcatcaactttgccctagaaggtggcgcgatcgaaacggatggtgccggcaccttgctaaccacgtggcgctgcctgcacgaacgccacccccagcgcacccgtaaaacactggatgccaacttgactgcatggctggcacaaaacagggtactgtggctggaacatggttatcttgagggcgacgataccgacgcccacatcgacacccttgcccgcttcgcctcgacagacagcattgtctatcaatcatgcgacaacacaacggacagccattacgccgaattgcaagcaatggctaatgaattgaccgcactacgcaccaccgaaggacgtgcttacagactgttcccactcccatggacaaagccaatcctagaccaagatcgacgcctacccgcttcttacgccaactttctcatcatcgaaggagcggtcctgatgccaacctatgacgatccagccgatacaatcgcacaatcagtgttggccgaagcctttccaactcgtgaaatcgttccagtaccatgccgtcccttgatctggcaaaacggaagcctgcactgcatcaccatgcagataccagctggcctgcttgccacataaccccatgtattggataacactgcgctgaggccgcaacccctctcaagattacacacgagccccccattgcgcattcttcatatatgtcatgacccctcatcttctccccgtagcgctgatccaagagcgcaaccatggcactgcggaagccaatttgagcatcatcgaagcacgtgtcaccgaagctgccgcacagggcgctcaactggtgctgctgcatgaattacacaacagcgcatacttctgccaacacgaatcggtcaacgaattcgacttagccgagccaattccaggtccaagtaccgaacgcctaagcgcactggcgaaacaacatcgtgtggttattattggctcactgtttgagaagcgtgccgcaggcctctatcacaatactgcggtggtactagaaaaggacggcaggctagttggcaaataccgtaagatgcacattccagatgaccctggtttctatgagaagttctacttcaccccaggtgatatcggcttcaaaccaatcgatacatctgtcggccgtctcggtgttctagtgtgctgggatcaatggtacccagaagcagcacgactaatggcgcttgcaggtgccgaactactgctatacccaactgcaatcggctgggatccgaatgatgaacacgacgagcaaacccggcagcgcgacgcttggttactgagccatcgtggccacgccattgcgaatagcctacccgtactcagttgcaaccgtaccggccacgaaccatcaccactcggcacctcaggcattcacttttggggaaacagccacgtcctcggcccacaaggcgagttcctcgctgaagccaacagcaacggaccagaaattttgacatgcgaaatcaacctacaacgcagcgagcacgtaaggcggatctggccatttctgcgcgaccgtcgcatcgacgcctacggcgacttactcaaacgttacattgactagacggtaaacaccgcagccttaccggcccgtcagacggcacatcggtctagtgtgactcacctcccctcttccggacgaatccttcgatgattccctctgtttccccacaacaagacgccctcaccggacaaccgctacgtgtagttgaacgcgatggcgtgcactacaccctcctcggaactgctcacatctcccaagccagcgtagctgcagtcaaacaagaagttgaaagtggctgctatgacgctatcgctgtcgaactggacgcacagcgcctgcaagcactatgcgatccagatacgttagctaagctcgacctgatacaagtgatccgtaaaggacaattggcattatttgcagccaacctggctctagcggcataccagcgccgcctagccaaacagctaggtatcgaacctggtgccgaactgaagaccgcagtgaccatggcacgcgaacgcgatctcccagtccatttgatcgaccgcgaagtcggccttacttttaaacgtgcctcggccaaacttggcttcctcggaaaattgaagttgggcagtggactaattgcaggactgttcgcagccgatgaggtcggagaagaagaaattgaaaaactcaagcaaggcgacatgctcgaagctagctttggcgacttcgccagcgaaagccctgagctataccaaaccatcatcgcagagcgcgaccgctacatggccacccgcctacgcgaagaagtaaacagtacaacacccaaagtactggtggttgtcggtgcaggtcatttaactggattggccaaacaccttgagaacgacacagagccacctaccgaactgcgcgccctactcgaaaaagtacaacagaaaaaacgggtcccctggttcacactgggactaatggcactcatcgctaccggtattgtgcacggattcttgcgcggtggcttggctatgggcacagacctgttactgcaatgggcactatacaccagcaccctagccgcacttggctgcgcattagcaggcagccatccattgagtgtgctggtggcattactggtcgcaccattcaaaccgttccgggtaaccctaccgactggtgccttcgccgcactggtcgaaatacatttgcgcaaaccagcctaccaagacttcctcaccctacgcgacgacgcacaaaccctctacggctggtataaaaaccgagtctcaagagtgatgctgaccttcgcattcaccaacctaggcagcatgctcggcgtctggattgccggtgtaagcatctacaatcgcctacacagctaacccaccatcaaaaaaccacaacgtgcctcctatacaaacggatcactgcaccacataacgatacccatcatcagtggtgcatcatccattgccgcaatgagcacaaaatgagcacaagcagtcacaaaacaccaccgtcacttccactaccaaacacacacctcatggcccctcgcgccccacaggacgtaaccccatcggcctatcaatttctaccgtcgccggcaaccgcaaaatacgcaattccctgccctgccaaggcgtcacctcaccgttaaccctggacacaccaggcacgccagcatatggccaccgaaacaccacaccaccagatggcatcaccaatcccgacttaatgtcaatgcgtaatttcttttcgctcccctgaatgtgatagctcaatcgtccctgaggcgtgcgcagatcgtgcaaagccacaccctcacctccaaaccaatgcaccgggacacctgctgcaatcaccaaactggaatccgattcacgcgtataagcaaacatatcaagtaccgaacgcacaaaatccgaagcaacccaggcatgcggcaaatcaccaaggaaaaacggcacattaggggtgtgcgaaacaacctcgggccactgattccatccctgcggcgcacggtctccaagaaaatacttagccgcatcccagacacggttacgccaatccaaacgcacaaaagcagacacattacgccactcatacagcgtgtaatccttccacttgcgcttaccatcacggcgctcaacaaaatcactccagtaacgctcaaaagtattaacgagtaaatcctgaggcagtaaagaccgctccccctcaagcgccaacgcgaccgccgttgaggtcgcatcaaaatcaccatgctcgaccgacccaggtaaaaaattgataccacggttccgaaccgccgaacgcaacgacgcagacaaatcagcagcgaactcgtcccgtgaaatactcagacgcaccgcatcctcaggcttatccaacacactcgccaaatacgccgcatcttcatagccacgcaatgcccaaaaattatcccaatacgcatgcaccggcttacccgaataaccctcgtgactgattgacgccggcatcatcccgtagaacgactgatcacgcatgaaattagcctcagtacgttcactcaaacgcaacgtatccatataagccgccgcagcactcacatgcggccacatcgcccccagaaaatcacgatcacgcgtgtagcgataatactcaccgatggcgtagatcaactccccatgactgtcattctctggcgttggatcactaccacggtgatccacacaacagggcaccatgccattagcaaactgatactgtgcaaaccaacgaatgtagtcgcgcaccacatcttcccgacccaatcgcagtaaagcctcggaaaccatcgcaccatcacgaatccaactacgcgaataagcacgtgtcccaggctgcacacttggcccatctcgcgaaataagcatatgcgccagtgcgctgcgcatgacatccaccactgaccgcccttcagcaggcacatcaatcttcaccaaattgagcttgtcgcgccacatctgcgcaacctgctgctgagcctgcttggcatcaaaaccactcggccatccggaagtcccagtttgcggcatcaacacggcgatctcacgcatttcgtttggctgaagatgccaacgaaataacatcaccccagacgccaacccactctcatcattcacctgagtgatagatggcagcgacgcttgcgccaaatggacaacatccataccggcatcgaatgcagtggcgtataccccatctggtgcccgcgaagcgaacacccgcggcttgccattaacattgacttgagtcccattgaacccaagctgatcaatccgactgacgccaccaagcatattgagaaattgcgaaggtggattcacctggaacggtcgcaccgccaacgcaagcgtgaaatcacgcgcctgcttgctcacattacgcaactgatagcgcgccaccaactgtgcctgctcaggtaccccttgcacaaatgcagtcacctgcaaattgacctgatcgtgacgccactccacacacggaatcggcaaatacccttcttgtagactctgctgactgctgacgtcagaccaacgtagcaaacggttaccatccatcaccacaaaaggctcgatactgaaaccgaacttagtcgcctcaatcgcaccatctgtattgatcaacccctgctcggtaccaccatctaaaccgagaatcgtccaataagactgctcacccgaaaaactgcgtgggaaactaccacgcggccaaaccgacgctaaagatttaataaaatcgttcggcgtcgcagcgaacgccaacggctgcaacttaatctccttaattccatagcgccaattcgggccatcctgcagatcaaagcgcacataacgcgcctcagtatccggtaacgccagccaatgagtgaagtaagtaccagcaaccacattgcgcaacaccttccagcgacgaccatccattgaaccgcggaccgtatagcgtgtcgcctgcaatcctggcacccaatcaatcaccgcaccaccaatctcccgtggtcttcccatgtccaaagtgaccgtctgctgcttaactccgctacttaaccaaaaagtctcgggccttccatccaccaaacgatacacaagggccggcgcagtgtcggtaattgccgtagcagtcaacggcgaagtatccgacgcaggcaacaccttcaacgcaagcctatcgaaacagatactcccacgcccaccaacactattgtggatattgaactcaagctgcgcactgcgacgcagcgtcttatccgtatcagggccccaagccttgtcgatctggcgcttacggtaactgaccgatgtccaattccctggcacctcgaacttagttcgattgacccaccaaacattgtcaccactcacatcaaacaacttcaattgcaaatcgttggctggcgcatcaccacgcactaaaaaagagaactgataattttcagagtactggatcggcaactcacggcggataccaacatcaccagcaaccccattaaagttgtaatccaaacacagcgcatagcccccagaagcgactgccacttgacgcaaagtgccactcacatcatgagaaagaaccagcttccaagaagaaatattctcaaaatcatccagaacctgctcctgctcagcctgggcagcgcatatccagatacacgccacaaccacgctgaggatttgtaacactcgcttcaccctttcacgctccccagcaacaaaccctggatgtagtaacgctgcaacagcatgaacaacagcaataccgggagcacggtcaccactgctcctgccatcatcatttctatatccatgacgtgttcgcgcgcgagcgcagccaacgtcaccggcaacgtgtagtgcgcctggtcagtgagcacgatcaacggccacataaaatcattccaagaagccatgaacgtaaacgttattaacgtcaccaataccggtttcagcatgggcagaacaatctggaagaaaatccgcatctcactggcaccatcaatgcgtgcggcctcaatcagatcattgggaataccccgcacgtactgccgaaccagaaaaatgccaaataccgtcgccaacgctggcatgatcaccccagcgaaactatcgaccaaatgcagatgcttcatcaacaaaaataacggcagcatcgccacctgtgctgggatcactaacgccgtaagaagcaactgaaaaacccgttcacgaccagcaaaacgtaacttggcgaaagcgtaaccagccatcgtattaaaaagcactgaaccaaatgtaatcgataacgacaccagcaaactgttaacgaagtaacgccccataccaacgcgcgcaaacaactcacggtagttcgcgaacgtcaccacagaaggaaaaaatggcggcggaaagcgactggcctcaccggctggcatcaatgacgcagacaccatccaaagcaagggcgctagactcaccaaggcaaacatgaacaagcacccattgaccaacacaatattccacttcgtgcgcccgacctcacgagtcataccaaatctttcctacgtccagcgcacagcatcaacgtcgtcaccccaagaacaaccaaaaacaacagaaacgcgacagcagaagcacgtcccagattccaccacttaaaaccctcctcaaacatgaaatacagcacactgaccgtactttgtagaggatcccctcgagtcatcacataaggctctgcaaacaactggaaatagccagataccgtgataatcccaaccaccatcagcacaggccccagcatcggcaacgtgatatgcaggaattgctgccatttggacgcgccatcaatgcgcgcagcctcgtacagatcctgtggaatcgcctgcaaaccagccaaaaaaatcaccatgttgtagccaaagttcttccacaccgcgaacagcatgatcatcggcatcgccaaatgcggatcacccaaccaatcaattggatgaatgccaacacaattcagcagccaattcaccaccccatacttcaggtgaaacaagtaacgccaaatcagcgcgacagcaaccagcgtcgtcaccaccggagcaaacaacacggtgcgaaacaatcccttaaaacgcgccgctcttgaattcaacaacaacgcagctcccagcgacaccgtaatcgacatcggcatccccagcagcacaaaataggtcgtattccacagcgccttccagaacaacggggtatgcaacaactccagataattatccaatccaacaaaacgcagatacatcggattggccagagcgtacaaatcgaaatcggtcaaactgagtaccaacgccatcaataccggcacaccgaagaacatcccgatcaccaacaccgcaggaccagcaaacacccagcccgccaaagaagcccgcctcatggatgcactccctcaacacgcgacgcattaccgacctgttgtaggatccaacgacgcttagcaagaatcttatcgacacgctgatcaagttgctctaccgcctgctgctccgataaacccccacgtactacctgctcggtgatcaaccgcatctcctgcacgatccgctcccactccagcaccttgggtgtggctttgacccgctccaactgctctgcgaaagcacgcgccaacggatcttcagccaaaccaggaaaatgccaagtactacgccgcggcggcaaatctccgatgatactgtggaagcgagcctgcacttgcggccgagacagatattccaccaatcgccaagccacctgtttactctgtgaagatttaaaaatcaccaagctggagccgccagcaataccagcaccaagcccatttggaccaggtaatggcatcgtgccccattgaccactcatattcggtggctgacgcaacttaaactcgcgcacattccacggccctgaaaaatagaacgcataattgccgttaaagaactcataccagacattagacacctgggtttcggacaccttaggtgcccactcttgcccataaatagtgcgataaaaatgcagtgccctacggaatccgggactgcggaaattgccataattatcgttatcacgtagcaacggatcgtcctgctgcaacgccaacgaaagctgctgctcaaactcattgagcggcattaagatggcataacgatctgctccaacgtagcgcttgatcgcggccatcgcacgttcccaatcggcccacgtcgttaaaggtgcgcggtacccagcgacctccaaaatatccttgcgatagaacaacagacgtgtgtctacataccacggcacaccataaagcctaccagcaacgacgttggtctcccaaacaccagggaagtaatccgcagacatcaccacgttggacgtggacacatacggctgtagcggctcaagcgcatccaacaacgcaaattccggaagccacgtattccctaattggcacacatcaggaagtcgatccgcagcaaacgctgtcaacaacttctcatgagcagcactcatcggaatgttctgaagctccacatggatccccggatactccttctcgaagtcacggaccaatgcagcgaccacctcggcctcacgccccattgcccaaaatcgcaccgtgtgcctggatgactcatgaccacaagccaccatcaccaagccagccaacaaccaaacaagacatttaccggaatacactcactactccggtttcttacctaaagaagatgggacccgctgcgtctgcgcaggcggagcatgtgactctgcaatccctaacgaacgcaccgccgccgcacgctcatccttttgcggcccacgcagcacctcatcctcttggagccagccaccaataaaaccagcacgttccaacccagtacgcacatatttattcttcttcatcacattccagacgaaatcattacggtagttagcaatcatgctaagaatgatcccttggtcgataccaatataatcactggccacccaaccacggccagggatcaaacgacctgttttaagcggaacgttataatcgaaactcggattaaacgcatccagaaaaccataactggaatataaaaagtcaccgtaacgcttgtgcatctccagcgtcgctgggatcaccacttccggagcgaacacgatcgaagccaccgtcgcagttggtgcaatcgtaccgtcatcaaagaactcaaacagcccagcaccacggctgcgatagtggaaaaactgacgctgctcaccgcggtattcctgcgtcgtgttttgcggcccatcgctggcagtcaatccccaaacgttctcaccataatccttccacttcatcggattatcgattgcataatcccggtgagcaagcactgcacgacgactattaagaaaataatcaataccgcgctcacgcatgtattggtcttgaatatctcgaaaatccacccagacatgcgtgtactgatgtccaaacaacggcccgaaagccagatactcctgcccctggaacaccccccaatccttgttataagtgcgtgtccactcatcccaggagaccggttccaacggatgagttggcgaaccgagtgcgagcaaatagaccatcatcgcttcgttgtagcccatccagtcatgctcaatgaagccacgctcaggataccaacccatcgaaatcagcggtttgcgctgttgcaaatacaaccaatcaacccgcctgtatagcttgtcagcaatctgacggatttccttctcacggacatcctcaccatcgtaataagactcgacgaacaacacccccatcatcagcaatgcagtatccacactcgacaactccacccaactgtcgtagcgatgcccatgctgcatatccaagaagtggtagaaaaaacccttgtagccagcgcaaccggtacgctgcggccccattggagcatcgcgcaagaatttcaacgtcgtcaaagtacgatcaatcgcttgattacgactgatccaaccgttttctatcccgataggatatgcggtcaacgcgaacccgacagaagcgatgcttgcaaacggccttgatggataacgatccggagtcaggccattcacctcattcgtcgtgtcccaaaaaaactgaaacgtacgccgctcaatatccaaaaacaacggaggcagatcaggcttgagcggacgcggcggcaatttagcttcaaccatgatgatctgccgcttagccgatggagagtcctgtttgcacccttgcaataacaacgcagcaactgacaacaggaaaacaaaccaatgtgatgaaaatcgcagattcatcgaatccaccaatacgtaacgcctacatatcacataaaaaacacagccttagcaaccgcccccatttggagcggaaccaacatacccaatcactcccccacaccgaactcaaaccacaacttgaacaatacccacaatgtactcagcaaaacgtcttgtaatacgagcctacaagcggatgctgacactttagatagccccctccttgaccatcaatcctctcaatttagatggacaaatcacatataaacaaagcctgatcaccgattctacaaacgcagtgtagatcgcccagcaccttgtcaaatctatagagtgcacattaacgaccgagaaaatgacctatttgcaatacaacacccacaagagcatccccacttaacgcccccttgcacattgtatccctatgcccagccagctacctactgacgactaccaaatgctttactcaaaatacgtaaatagctggaatcgattcgaagaaaaaaccacactaaaaaacctcacggaaccacccaaacaaccatctacgctttatcaatgaacattttgatgtacctaaaacatgaaaacgaaacagcattgatacaaccactcagacattttggacagcaccaacgacaatcgtttattgccgctcaccttcatcaaccaacgcttggattgagagcgcgtggatatccgtttccatcatggaacccaatgccgcatacacagcacgatgccgagcaagcagcgtttttccagcaaacatcggcgtgacaatcaaaacactgaaatgcccacgcccatcacgcgcaccggaatgaccaatatggcgatcactttcatccttcacttccaaccgtgacggtgcaaaagcatccccaagcacaatctgaatctgttcgacacgattcacagcaacaccccaccccacacatcattccctaacctgacacaagaatccgtgtccgcacaagccacagccccccgcccacgaaaaacaaaaccagacaatgaccacactggaacgacatcctactgaccgcagctccctcgcatcgaccacagagaacacaacagcaaccgtcaaaccattaagatagatcagcacctgcagacactgaagacctccaaccctcctccccctgccttcgcaacatcggaaccaccctcaacctccatcacgtaacacatacaactttgctcgcgcttcgagaaaaccgacacctatcgcagcgccccacctccacacactgctagacaccggaccaacaagcgaattacccttggcagaatgatacgcagccacaggacaacggctctgccggtcccgccaagaaatagaaaggcatcccactcatgatcagcacgctatgcgatgctggcaatgcaatacctcaggacatcctgttttgacctcaagtcactaacgattttgattgtgcattctcaaaggcgtgctacaaacgacacggcatcggattgcagcaaaacttcaatgtgatacaaaaacatctaccggatcgaaaccacgaccggcaattgccccatccaatatcaacacgatgaattcagaacgcgcacaagtcgcgaatccaccaacacaaacaccagtgccgcaacagcaggaaataccgctggcaatggtgcatggccagccagtgctacagatccctcaggacctgtatatccccccagatgcactggaagtcattcttgatgcattcgaaggtcctctggacctgctgctgtatctcatccgccgtcagaacctgaatatcctcgacattccggttgctgaaatcacccgacaatacgttgactacatcaatgtgatgcaggaactgcgctttgaactggccgctgagtatcttgtcatggcagctatcctcgcagaaatcaaatcacgcatgctgctgccgcgcccacccaacatcgaaaacgaagaaggcgaagacccccgcgccgaattggtacgacgtttgcaagaatatgaacgcttcaaacaagccgctgaagatctagacgccctaccacgcctggaccgcgacaacagcgcagcacatgcctttgttgcagaccagaccacagtacggattcctcctccggtcaacatgaaagaactgctgctggcactacaagacgtcctcaagcgtgccgaactgttcagcggccacgctatccgacgcgaagcactgagcgtacgccaacgcatgggcgatatactggcccatctggaagacggcaagtttcacccatttacaacactgttcaccgctgaagaaggcaagcttggggtactggtcaccttcctagcaatactggaactcgctaaagaacagctattggatatcgtccaagaagcttcgctaggcccgatctacataaaatccctggccatccatcacaccaacggaccgctgcagctctccagcgacttcgacaacagcccctcaacccatgcccccccatgaagccgacacccagctggatttgacgttgatcgcacgcatcgtcgaaggtgcattgctggccagcaatcaaccgctaacactggcgcaactgcaaggcttgttcccaaacgacccaccgatacccccggatagcatccagcgcgccattgaactgctacagcacacctgtgctgaacgcagcgtagaactcgtggaagtagcctccggtttccgttttcaactcaaagcagacgtgcatgcttgggtcaccccactctggacagaacgcaagaccaaatactctcgcgccacacttgaaaccttagccctcattgcctaccgccaaccgatcacacgtggagaaatcgagcaaatacgcggcgtcgccgtcaacagcaacattattcacacattggaagaacgcgaatggattcgcgtcgtcggccaccgcgatgcacctggcaaaccagcattattcggtaccaccaaagcatttctagattacttcggacttaaacgtctggacgaactaccgccactatcggatctgaaagacattggcgaactggaaccgcaattgccgctgcataacaaccaccgacacaccgcacagcttcaaattcaaacagaccagactcccaacagatcaatatcaggcacaacagcccccatatcgggcatttctccccaaccaacccaagaggtgaataccgatacacagaccaacatcgccaccgatatcaccgacaacgaccagccatctacggataaccaaacctcagacagagcaacagacctgataacaatcgaccttgaaaatcacaacacctccccctttcccctcgaagacgtaccggataacagcgtgacaccaccaaacgaacacgaagacaacaccatcaacaaaacgtctacagccgatcactacattgactcagactcacagagcgacgcagacacgcccccggacggagcttacccccatgagtgataccccaaaaccaccatcaaacacactttcactcaaacgcgagacagccacagaagcacccaaactggaagagcgcctgcataaagtgcttgcccaagcgggtctgggttcccgccgtgccctggaacaacgcatctccaacgggctcatcaaagtcaatggagacattgcacagctcggcatgtccgttaaaagtggcgacaaaatcgaactggacggccgcagcttcgtcgccagcgccctcactgaaccggcgcgcgtactgatctacaacaaaccagaaggcgaagtgaccacacgcgaagacccagagggtcgccccacggtgttcgaaacactccccgtcctcaaaggtgcacgttggatcgccatcggccgcctggatatcaacaccactggcctattactgctcaccacagacggcgaacttgccaatgcaatgatgcacccctcatcggaaatagaacgcgaatatgtcgtacgtgtacgctcccccgaaggagaagaacatgtgcaggatgagctactcgagcaactgacgcgcggcgtcatgctggaagacggcaccgcaaaattcgacacgattgaacgcatcggcaacaccgactcacacgactggtttcgtgtcgttgtcaaagaaggccgcaaccgcgaagtacgtcggctatgggaatcgcaaggctgccaagtcagccgcctcaaacgtacacgttatggttccgtcctcctaccacgcgaactactgcgtggccaatcgaccgaactacccaagacccaagtagaagcactacgcacccaactgaaactagaaaaagacatgccgttagcactcaccctgcaaccgattatcggccaacgccgttcagccaaagccacactgcacgtgaatcgcaacgacaacaacaaacacgcctaccacaacaaccacagcaccgccgatgaaagtcgcgaattgcgtcgctttgacaccctgcgtgatgaccgaggtcgcggccaaggcaagcaccacttcaaagatagactgaccgtcagtggcgaagctgccgcaaaacaagcacacaaacccttcaaacaatacaaacccaagaacgaccgttcgctatcggaaggcagcccggcaacattccagagctggtacgtccctgaaggcgtcagcaccggcccccgcaaccaccgcaatgctggtgctggcaatggtgcccaccccaacaaaaaaagcccaaacccaaacacccgtaacacaccgggacaacaaacacgcaagtctccatacaaatacccgaacaatgcacctaacttcccctccgaccacgccacgccaaccttcaacccctatggcaaccctgggcagaaaacaggggcaggccgaccaaacaacagcggtggcaaatacaaccgcaatcggggaccaagatacccataatcattgaaccctcattagcccccttgaaacatctcaagcattcgccagcacatccacccttacaaacgcttgaaaccaaatcaatcaccaacgaataaccttgcattccgaaacatcaatgcccattgatttagccaaaacacctggaacgccccgcgtatcctccctgcctgataagcaggcccccactacacacctgcgaacaacttacaaccgtacaagccccggaaaagcggcatcgaagctccccacaacaataaaacgatacgtcgtactcaatcagtaaaaccaacaacgaaacacccactgtaaccacacaccgcacctgactcacagcaaacccaggccccacctccattcattcatcatcccgccatagcgaccccaacggaatcctcaacttgctggtttgcacccccctaccgagcgtggctgcacacgccgcgcaacattgctctggccgccagatccacggcgtttaatgacgaaattaccgaaaccaataccaagatcaatgccactccccgtcccgcctagagacaacgacgcatcccctttcgtcaccaactggatgttcccagatttcacaatcccgacatgcgcctccgccccaccatacgtgccaaacacatcattgatgttgtagatcccaaagaacttgccgcgcccaccaatgatcttggacttgccaaacgtcagccccccccccttggcgctaatcgtgactggaatcaccatgccattcgcacacgtgaccgtaccaataccgctggccgtcttatagaacaccgaccaaccagccaaattaaagcgaagcttacagcccatatcgtctacagctttggcttgtggcgtcaataaaaccgtactcaaagccaccgctatggcccaatacttaaaatgcatgatcggtattccaaatgaacaatggcgctgactgtagcagcccatccacctaggagatgagatacccccaagtgcccattcagcaactaatcaccgattaatacccgcccatttccaacgcaaaagcatctgcatccagcattgctggaaaacgagcgcggtgctctgccaataccttccccctgatgaccgccccccctcctccgcaccgcccctactggctgcacatgccctgacctactcgcgcaacgcaacccccatcctcggccccctgcatttccatatcaaccccggtgaagccctcatcgtccagggacccaacggcatcggcaaaaccaccctgctacgcatcctggccggactcctgcacagcgacagcggccacatcgacatcaacacacaccacaacaccacagccccagaacgcacccgccacattgcctacctgagtcacctccctggactgaaacaagacctctcagccctggaaaacctccactttctgaacgccttgcatggctaccacccccaacggacacccagcaacgcactcaccctcgttggcctgacagaccatgcacagacactggttcggcaactttcagccggccagaagaaacgcctcagcctggcccaactgtggctctcaccagcgccgttatggctcttggacgaaccctacgccaacctagatccagagggcatcacactcctcaaccacatcctcaccgcacacattcacacccaaggcggcacactgctcaccacacccggcgcgcgccccacactgccagtccccacccgcctgcttcacttaaaaaaagctccatgagcgcaccgacccccaccctatccctctggcaggcttcatctgccatcatcacccgagacctgcgcctactgtggcgccgccgcgccgccgccatacaccccattttatttgcactgctcattgtcgtcctcttcgccctcggcctgggccccaaaccacaacaactggcagacgccgccccaaccatcctatggatcacagtgctcctcgcaagcttactgacactggacacactgttccgcgccgacgttgaagacggcaccatggaacaatggctcctctcacccctccccctcgcctggctcatcgccgtgcggatcgcctgccactggaccgccagcgtcctaccactgatcatcatcaccccattactgggcgcattcctgcaactaccacatgaacaactgcccatcgtgatggcatccctactattgggcaccccactactgagcctcctcggcgctgtcatcgccgcattgaccgtcaccatgccacgtgctgggatcctcgtcgccctccttgcactgcccctatacgtccccgtcctgatcttcggcaccggcagcatcaccgccgccacccagggccatgacagtactggcgcactcctcctcctcggcgccggcttagcccttggcaccgtactagcaccactcaccgctgccgcagcaatccgcatttcactcagttaaaacacccttgtttatccaaacacccgccaccgcatgaacacctttgtccatacactgcatcggctcagctcaccgcagacgttcgaccaattcgccgcccgctgggcaccccgatgctattgcaccgcactgatcctgatgattcccgcactgtggcaagcactgatcgtcttgccaccagaacactacatgggcgatagcgtgcgcatcctgtacctccatgtccccagcgcctggatgagcctgttcatattcggactgatggcactgtacgcagcaatcgccttggtatggcgcatcaaattgtgcgagatcctcgcgatggcctgcgcccccagcggtgccgccttcaccctcatcaccttactgaccggaagcctgtggggccgtagcacctggggtaccttctgggactgggacccccgcctgacaagcgaactgatcctcctattcctgtatttgggcgtgatcggcctctaccacaccatcgaagatcgccgcaccgcagcacgcaccgccggactccttgccatcgtcggcaccgcactgctacccgtcatccgctactccgtcctctggtggaactccctacatcaagggcaaaccctgcgcctctttggcacatcaagcatgtacggcatcaccacagtgtggctgatggtggcagccacccaatgctggttccttggctcactgctacgccgcgcccgtgccgaaaacctacgctggaacgcccaccaacactggggcaccgcacccctgaaatcaccccgatgacccacctcccctatgtcaccggcgcgtatgccgtattcatcctcatcctcctatgggactggctcgccgcacgccgccaactccgcactgcacagcaacttgcacagcatttacacaaacgccgcaacacacctgccatcgacaacacaccgacacaatgaatgcacgccgccgcctttggagtctcctgatgctgatactggccgtcggaaccgcagccaccctcactatcatggcgttgcgacgcaacctcacatacctatacatgccctcagaagtactacgtggcgacacggcccagcaaacacatttcagactcggcggcatcgtggaaaaaggatcattccaacgcacctccggcaccctgcacacccgcttcatcgtcaccgatggcaacgcacgcctccaagtacgctatgcccgcatcctcccagacctgttccgcgaaggccaagcagtcgtcgcaaccggacagatgcaacatggcatcttcattgcagaaaacatcttggcacggcacaacgaaacctatacaccgcggacactgaccaacaaaatgcaacccacacctacgcaacacacccacctagacacccccattgcccaaacaacaccttgagcaatcccacaccaccacacctgtctcagatgatgcctccccagcccctggagccacacccggcacccctgctccccccatgaaacacacccaccgcatccccactcgatacagcccacatgctgcctgagtttggccagatcctcctgatcctcgccctgctgacagcactgctgcagggactgcttcccctgattggcgcccagcgccgccgcacggcttggatggccgttgcacgcccagccgcctatgtgcaactgagcctgctcgctggcgcattcgcactgctcacctatgccttcctcggcaacgacttctccgtccaatacgtcgccgaaaactcccattcactgctacccaccctctaccgctctaccgccgtgtggggtgcccacgaaggatccctcttactctgggtattgctcctggcaggatggaccgctagcgtcgccttacgttcccacaccctcccagccaccctgagcgcacgcatccttggcgtcctgggcctgattgcactcggcttcctcgccctgatcctcttcacctccaacccattcgcacgtctcctgcctgccgtcccagaagggaacgacctcaacccgttgctgcaagatcccgggatgattgtgcatccccccctgttatatgccggctacatcggtttcgcagtgccattcgcctttgccgtcgcggtcctgctggaaggacgcatcgatccaacctggctacgctggagccgcccttggacccataccgcctgggcactgctgaccctgggtatcgcactgggcagctggtgggcctactacgaactcggctggggcggctggtggttctgggaccccgtggaaaacgccagcttcatgccgtggctcatcggtgtcgcactgattcattcccaagcgatcaccgacaaacgcggcagcttcacccactggacactcctgctcgcaatcaccgcctttgcactagcactgctgggcacattcctcgtccgctcaagcgtactgacctcagtccatgcctttgctgctgatccggtacgcggcgcgtttattctgctgctcatcttcacgttgattggcggcgcactgctgctgtatgcacggcgtgcaccgcagctcacccccgtcacaataaacatgcaacaacgctttacacccgtctcacgcgaaaccctattactgctcaacaacctattgctgacctgcgcctgtgcgatggtgctgctaggcaccctctatcccctgctggccgatgcactggcactgggtcaactttcagtcggcccaccctacttcggccccctattcaccctgctgatgacaccactaatcgtcttactgccattgggtccattcacccgatggcaacgcgaacacccctcaacacccctcgtactgctggccccttgggccgcactgagcctggctgtcgccgcactggctggcatcaccacaccacagcaccattggaaaaccatgctcagcgtggccgcggcagcatgggtactcctgggaaccctccgcttcctctggtggcactggcgcatcaccggatcccgtcccacccccagcaccctgggcatggtcctggcacacgccggaattggtgtcttcctcactggcgcgctgttagttgaaacactcagcctacaacgtgaaattgcactcagcccgggccagacactcaccctcggccccatcaccctgcactttgatgccctcctcgaacaccacggccccaactacgtggctgatcgtgcccgattcagcctattacgcaacacgcatcccctgggcaccctgacgacagaaaaacgccgctatgtcagtggcggccaagtcaccaccgaagccggcatccatcctggagcgctcggtgacatctacgtcgcattaggagaatccctgggcaatgggtcatgggcaattcaggcacactacaaacccttcgtccgctggatctggctgggcgcagcactaatggccctgggcgggctgatcgctgctgctgatcgccggttccgccaccacccggagtcatcgcatgtctgattcaccccgccgctttcccaccccgctgctccttacaggtgtcatgggagtgctgatcctgatcgcactgctcaccttcacattaatgcgctcctgggataacgcaccggaccaatcggcactgctcgggaaaccagcgccaaacttctcactcccactgctgcatgacccatcactgcaaatcagcaacaccgacttggccggtgccccctacctgctgcatgtctggggcagctggtgtgccgcctgcgccaccgaacagcccgtactgacgcactttgcactcagcaaacgggtacgcgtgattggctacaactggaaagaccggcgggaagatgccttgcaatggctcgaacaactcggcaacccgtatctggccgtggtgtctgatccagaaggcaaaacggctatggattggggcgtgaccgccgcaccaacaacattcttgattgacggacgcgggatcgtacgctggcatcacaaaggcgccctgaatcagcagataatcgaacacaaactattaccgatccttgccgatatcgaacactcacccaccgccgcacccgcattgcatcaggcaccatgaaacacgcacgtgcacttctgctatgtgcggcattgccctttgccatccaagcacagctaaggagcgatccaacaccactccactatcgcgataccgccgaagcaacccgttttcacaccctcaccgcagaactacgctgcgtgcaatgcccaaaccagtcactggctgattctcaagccccaatcgcccacgacctgcggcatcaagtgttgtcactgatgcgccaaggtcacagcgacgcacaaatcaaacaatttctggtggatcgctacggcctcttcgtgctgtaccaaccaccgttgcagtacaccaccctggcactgtggttcggcccactgttcttgctgctaatcggcgtgaccgtggttgcaggggtgatccggcgctaccgcgcacccccaccgccctcagacaaccgcaccaccaggtgaaaccgacgttttggttcctgacgctattattcaccctggcaacattaagcctggcgctaaaaccactgtggccccaagcacgcggcacactggcaatgtcattactcctgctgagtcttgctgccgccgcactgtataccttggtcggcaccccacaggcattacaaccggcccagatcgccgcaccgcagacccttgatgcagccattgcgcaactgcgtgacaccttgcatcagcatccagaacggatagaaggctggatgctcctgggacacgcactgcgccaacaacagcattttggcgaagcgcagaaggccttgacagaagccgggcgacgcgccccaaacaatcccgatattttgatggctactgctgaaatacgcatgcacatggcaccaaaccaacgccttgacgccgaagcaatccgcatcctcaaacacgtcttgatcttgcaaccccagcaccaacgcgcccgctggtttctcggcatggcataccgccaagccggcgatgccaccgccgcagtagcaacctgggaaccgctgctgagcgtcgtcgacaccgcgaccgcccacagcctacgcgaacagatcgccctggcacggcacgatgcccacgtagcagcgcagccacatcaataactggacgctgggcgcacgttccaccaaccgcaccgacaccgacaccgacaccgacaccgacaccgacaccgacaccgacaccgacactgtcccacaaccggacactccccagcttcgccccccaacacacggcctaacacctgtcaccgtgacccgccctctagaggaacgaccgctgcatctgcacgttgctgacagcaccgcccctgaaaccacgccagccatcctgccgcatcaacagagagcagcagcatcccacctggcacacaacaatcacacatcaccacgcagcaaaaacctggcctatgctctggcacgctttgatctacaagaaaacaagccgattgcactcacatcgcagcatgaagatgcaaagacctgccgcagcccattcccgctctggacatgctgctgactcacactgcgtccccctgctgggacatcacacatcaggcactatctgcacaccacatgaaaaaggctgaaaccacagcaacgacgcgcgccacaaccacctctcccaggttcccccacatcgtgccaaacacagatcgctcaatcctaggcatagacctcactagaattttgaaatgaccgaatttatccctccgggcagcctattccatgcgctctcctctccatttccgatgaagcgtggcggacaactccaccgcgcgcgcatcgcttacgaaacatggggccacctcaatgccagcgccaccaatgccattctgatcatgcctggcttgtcacctaatgcacatgccgcacaccatgacagcaatgctgagccaggctggtgggagtcaatgctaggtccaggcaaacccatcgacacagaccgttggttcgtgatctgcgtcaactcactgggtagctgcaaaggatccactggccctgcatcgtacaaccccatcacgcaggccatgtatcgtttggactttccagcactgtcaatcgaagacggggccaacgccgcaattgaagtggtgcatgcactcggcatcaagcaacttgccagcctgatcggcaattcaatgggggggatgacggcactggccatcctgctgttacatccggacattgcccgcagccacatcaacatttcaggcagcgcgcaggcattaccgttttccatcgccattcgctcgctacaacgcgaggcgatccgcctggacccccattggaatcagggacactacgacgacacccactacccggaatcggggctacgcatcgcacgcaaactcggggtgatcacctaccgctccgcgctggaatgggacgggcgttttggccgggtacgcttggattcggaccaaaccaacgacacaccattcggactggaattccaaattgaaaactacttggaaagccatgcacaccgcttcgtgcacaccttcgacccaaattgctacctgtacctgagccgctccatggactggttcgacgtggccgagtacgccaatggagacattcttgccgggctggccaggatccgaatccaacgcgcactcgccatcggtagccataccgacatcctctttccaatacaacagcaacaacaaattgccgaagggctacgccgtggcggtacacacgccaccttcctgggccttgactcaccgcagggacatgatgcattccttgtggatatcgcaggatttggccctccagtgaaggaatttctggacgaactgtgagcctccccccggaaccgaaagacgcctgcgcagatgtacacagacaggctcatcagcaccaagcaacccgcatccccgcaagcgcaacgatgcattgatccacaccttgaggagtgcgctcatacaacaacagcgtgatccaatagcaacgcgcagccgtggaggccgccgaccagcgcctccacgttcattcgacacatccggcattttttgaaatgccgtcattgtcaccgacagcagcagtgttgcttggagcaacgtgcggccactgctgtttcaacatccgcatggccgctgtacagctgcgattggacacacattgattagataggcgaatcaggaaatacgctggaaaaattgataaatgccgccgaacaatcgtatgggttgcccacacctggacttccactcacagtcacatcgtaagcaaccgagggggtaatcaaaggagcgaaactgaccggaccgggaccgaagtgaaaatgcactgcctgcggattggcgaatacgacactgctgggaggcgctatcaatgttggcaaaaaaccgtcgaatacgacgttatccagactcagcgtcattggcagattattcccactgccgaggatccccatgaaaagcagctgaccagcaccaaagacaggactttcaagcacatgaatatcttgcagcacgatatttttgaagagtggataagaattcccgttggaaggtttgtagaaggtgtcaaacgccagcggacgtttcagacgacgcatgcatattttggagtaggtgacatgatcgaccactccgccatgatcggcatcagatttcatatgcaagccattgctgttagggctgtcaaagccgtcgatactcaaatcactgacttccatatcgtgtacacctgactcggtgtcgctaccgatggacatgccatgtccatagccaaagtggttgtgtaagaagctcagagcgtcgcttggcatcttgccccgcgctttgatggcaacgtggtcatccccagtgctgatgtaggagtacgctagcagcacgtggtttgattgcccaggatcaaagccatcggtgttcttgaccgtgtccggggtaaagcatgtcgccggcgtcacaacatccggcgtggtaccgggcggacagtggtaccccggcatggtatagaccaagcttggggtcaggatacggatgccccatgcggtgacaccactgaccgtatcagcaaccacatggaagttaggtgcattttcgatggcgacacggtacaacgtgaagtcgttaccgcccctgatttggatcaaccgtggtacctgttgatgcagtgcatggtgcttgttctgataggccagatcccaccaggtacgctgccgagcatgcttaccaccagtcaaaatgctaccgccacgcccatcaatcacacccccacccacgataccgctaccggtggtgttgatcgcggagatctaatggcatacaactgaactcataggttgacgttgcagtaccgcacgtaccattgcctttgtcatagtccttggggttacgcgatgcaaacagcgtgacgccatcgtcaatccacaacgtcaccccagatttcaagtgcaacggcccactcaaaaagccggatttgcgatgactatccatcactagtttgaccgcgctaccggcgggacaatcatcgatggcatcctgtaaacgcttggtatcaggcttggaggcccgtggattggcatcgagtgcgtcaagggagccatgttcaggagtcaggcgcgcaggcaataccgtacacacgtgggtaggtaggctgggacgttgcacctcgccccagagcgttttcaccgataccggctcggaaagatcggatagggaaggctgtgatcctcgaaagacatcagcagtgccgcccattgcggcaaaacagtgcagtccaaagactagggggaggaaacggtcaaggttcataagaaaaacactctgaaaagaagggtaaggaagcagtcgcaccggaggcaaaaaagaccgacatcgttaggccagcactagggagagactcaccatcgcattgcgattgcgatgtttgtatcagcatgaccagaagggctaaccaacaaccggcagtgctctgagctgttaagcaaggacgcagggggatagcctgaccagcatcaggtgttgctggctgtgctgcgtcggggacatcgactggagtgcaatgatggcaatggatgtgtccaggggcatatcctccagcacactagtacaccggactgaagctgagcgactggggaacactggggagaaaacggcagcggatcatcactggtgaagggggcctgttggtgttgggcgttactggcgacaagcgacatcggagggcgccgatgcttatatggcaaccgatggttggtcggctggtgtgatcctgggaggctgccagtgcaacggatggggtcattgcgcaggtttggaactgatgcgaccgtctcggtgcgatgccggagcagatggagataacatcaccggaagctgtgagtcctcgaaaacagtgcagcatcacctttctgtggcaaggccaacaagcaagagaacaccgaagcagcacgggtcactgtgtccattgtaagtcagcagtggcttcacgttatctctgatcggtgtgcagtcacaccatccatacaggcaggcaggcaggcaggcaggcaggcagtagaaaatagctggcttgatgcgggattcggcagcccttgcgtcagtatcgtccaccctgtggggcacaggtcaggagcgagcattgctacgcttccctcttcagtctccaccgctggcagcacgccagcactgccagagttgccttaatggcgatggggtgccgcgctgccccagcacttcacgctgcaagcgtagccgcagcagacacgaccagatccggtgcgggcgtgccaatgtgggcttcaccggccaagcagcaagcagttgtgcacgccatgccaggagactgactccggcaggcgccgccgcctcgcccatcgcgcggtgacgagcatccaaccattgcactgcaagcacgcgtctgtcggccccttcaatacgagcaaacgccaccgtttctactacggcgatggcttctaccagcggttgcaatggcagcaaggcctggtcaaaggaatcagggcgtcggcgtgccgcctgcaatgcgggcaaggcatcggctaagacggcccagggtgcagagacaggctctaacaaccgtccgaggggatgccgcgagcgctgtgctgtccagtccatcagttcttgctgccaccaggcgagcttggcatcggctggcagtgggtcgcctgcgacattcatgacatcttcaaattcttgaagcagggtgaaccatgccatcgccagaggtcgctgcggctccgggataaacacttcggccactgaccattgcggccagcgggccagccacttgtccaggaagctatccaaagcaacggagtcagtcaccgtcagtacacgatcaatacaacaaggcgatgttcaggtactgggccaaacatcgggccgactcaacaggtggggttgttcaaccagggtatcggcctgccaggtcatggggttgtcttcatgggagcgatatccccacagtgcaaccattgagggcatgcccgccgcacgtgccgcctggatgtcgctgacatcgtctcccacgtagacacagtctgtaggcatgacgccaatacgctcagcggccgtcaacagtggtaggggatgcggtttacgctcggcgagggtatctccgccgatcagcacggcgcaacgggatgtccatcccagcaacggtaagatcagccgcgctaaaaactccggtttgttggtaacaatgccccacaccgtcccagcgcactccagggcatcaagcatcatttcaacgccatcgaatggcttggagacgctaccaatcagtgcttcataacgctggagaaactccggtatcagtccctggatggctgcagcatccagttccgggaaagccacagcaagaatcctaaatgtgcctatggaaatgaccggacgtagctgcgccaaggtgattggggcacgaccacgtgcggccaacatggcgttggcagtagcaagcatgtcgggggcgctatcaagcaatgtgccatccaaatcaaacaacaccgtacgggggaaggcgttgctggacggttcattcagtggcatgtggggcctcaggggagatggcacaagcaagatagttgatgtcagtgcggtcggtgagccgggcacgattgcgccacggctcgtaccgcatgccgctgacatcttccagatgcagtcctgcgtgacgcaaccaagcggctagttcagccggtctgatgaagtctttgtactgatgggtgcctttaggcaagagacgcaccacatattcagcacccaccacggccagcatgaatgcagccagggtccggttgattgtggacacaaacaatctgcctccgggttttaagaggtgggcgcaggcgtccacaatcgccgccggatcagggacatgctcaagcatctccatgcaggcgatggcatcaaacggggccggttgttcagcaagcaggtcttcaatggcctggatgcgatagtcaacctggatccccgattccaaaccatgcaggcgggccaccttaatcagttctggagccaggtcaatggcggtgacgtgtgcaccttggcgcgccagagcttcgctgagcaggccgccgccacaaccaacatcaaggacacgggcgccagacaggggcacgcgcttgctgatgtagtccaaacgcaccggatttaaggcatgtaagggtttctgggggccgtgtggatcccaccaaccactggtgaaggctgcaaatttatccagttcactttggcggtaatttttggaaacacggtcataagcggaggacatggcgaatctccttgaagcggtgcgcaggattcaaatacggatggcgcggatgcgctcgcgccactgacgcgctttagccaccagtgcagcggtatcgatgtcgataagctcacgctggatcaattttggctggccggcaatccacacatccgtgacgtgctgacgccctgcagcgtaaaccagttgcgagagtacgtggtacaagggctgtgtttcgagcgcgctcaagtccacgcagatcaggtcagcttgcttgccgatttcaatggaaccgatcagatggccgaaaccgagtgcgcgggcaccgcccagggtcgccgcacgcaaggtggtcgctgcgtccaaggcggtagggtcgttggccacagctttcgccagcatggctgcgatgcggttttcactcaacatgtccaggtcgttgttgcttgcgcagccatcggtaccgatggcgaggttcacaccagcgcggtgcagtgcgaaagcggggcaaaaaccggaagccagtttgaggttggattctgggcaatgcaccacgctaactccacgtgtggcgcacaattggatctcggattctgttaattgcgtcatatgtaccgcaatcaggcggtcattgaccaaatcaagtcggtccaatcgcgccaacggacgctggccatggtgtttgatggagtcagcaatttcctgggcggtctcgtgggtatgcagatgcaccaaaacatccagttgatcggcaaggacgcggacgcgctcgaagttcgcatcgctcactgtatagggggcatgtggcgcaaacgcggtaccgattaaggcatcgccgcgccattggtcgtgcaattcaatcgcacgggcaaagtactcatcatcgctgttagcccaggcggtcggaaaatcaatgatgaccgcgccgaccagggcgcggaaaccgtgctgtttgtagatcgcagcctggacgtcagggaaaaaatagttctcgttcgcgcaggtggtaccgccgcgcagcatctcggcgatggccagtgcggtgccgtcgcccacaaattccgggccgatcacggcagtctccacgggccagatgtgctgttgcaaccatgtcatgagtggcaggtcatcggccatgccacgtagtagggtcatagggttgtgggtatgggcgttgaccaatccgggtaataaggcggcttcagggcggctgaccgtgagcgagggggcaaagcgcaggcgggcctcggcaattggcagtaggccaacgatgacactctcacggaccgcaacggcatgttgttctagcacgatgccatggggttggatggggacaacgtagccagcctcaatcagcacatcgcagggttcagcagggaaagattcattggtcatgacaagtggggccagaaggtgatgtaggaggatctcgccctgtctgtaaagcaaacgccagccagtgtggttgctatgttggctggcatcgggttctcaatagtggcttgcatacgcaatcagtggaagaaaccgtgttacttgacacgtgagacgtactcgccagagcgtgtatccactttgatgacttcatcttgattcacaaataacgggacacgcacgacggcaccggtttccaaggtggccggcttgccgccgccgccagaggtgtcaccgcgtaaccccggatcggtttcggtgattttcagctcgacgaagttcggcggctgcactccgatcggcacaccgttccagagtgtgaccacacactgttcttcacctttaagccatttttcggcgccacccattccgtttttgtcggcttgaacttgttcaaaggtttcttgttgcatgaagtgccagtattcgccatcgctgtacaaatactgcatatctgtgtcgaccacgtcggctgcttcaagcgtatcggtggatttcatggtgacttcctgcacccggccggatttgatcaaacggtatttgacgcgggtaaaggcttggcccttaccaggcttgacatattcagtgtccgtaatgactgcgggttcggcgttgaccagaattttcatgccgttttttacatcgttcatgccgtaactggccatgctgaagttcctcaattaaacaaaaaaaccgccgcgataggagggggcagcggatacaatgaggcagcccaccggacatggtggggtttttcctcaacgcagcatgataaccgcagcctctgttcccttacagccatcccccgccagtccgttgcagccgccacgctggcagcaggtatggcgggaggcaatccgcgatccgcgcgagctacttgcattactcaggcttgatccgacatcggtcggtataagtgaggcggcggcggcgcagttcccgctgcgcgtgccgcgggggttcgtggcacggatgcgggttggtgatctgcatgatccgctgttacgtcaggtgttgccaatggacgcggaagaagatcagatcgctggcttcggtgtggatgcggtgggcgatggtgcagccaaacaggcaacgggaatcatccagaaatatcaagggcgcattctgctgattgctactggcagttgcgcggtgcattgccggtattgtttcagacggcactttccgtacgctgaagacacggcttcgcatgatcgctggcgggaagcggcagcgttcgtcagggctgatccattgattgaggaagtcattttgtccggtggcgatccgctgtcgttgtctaccgcgaagttggtggaattaaccgacgcgctgcgcagcattccccatctgaagcggctacggatccacagccgattgccggtggtgctccctgagcggatcgatacgccgctgctggagtggctcggcgcgcttccctggcctgtggcgtttgtaattcacgctaatcacgctaacgagttcgatgccagtgtcgatgccgctctggcggcgctgcgcggcgtcggaacccagttgctcaatcaagcggtgttactgcgtggcgtcaacgacaatatcaatgcgctagcggcattaagtgaacgcagtttcgccgctggggtactgccgtactatctgcatcagctcgaccgcatcgcaggcaccgcccactatgaggtggaggatgcgcgggcacgggcgctgcacgcggagttagttgcgcggctgtccggttatctggtgccacgcttcgtgcgtgaggtccctggtgacagcagtaaacgtccgctgtagagccatctcggggagcttgaggggcgcggctcaacgaaggtcatgctgtctgtaacggtttctgtgatgatccatgcgcatcacgctcagcacatgaaaaacgccgggacacgatgcgatggtttaggtgtcgcgctgacgcttcagcatgacgatacgttggacatcggagagtactccccgaagtaatcttatttcttgctgggttagttcggccttggcaaagaggcggcgcaatttgcgcattgccgattccggggcacgccctttgtgaaaatcgatctcatccaaggtctgtttgaattggccgaataaaccttccagttgggcatggctggcgggtgtcttgcggaatcctgaggttgaatggaggggcgcggagggtgcatcaagggatgccaaacggatttcataggccaagatctgcacggcagcagccaagttcaacgagctaaacagtggatcagcaggaatatgcacggcgacatggcatagctgcagttcttcgttggtcagtccggtgcgttcgcgcccaaacaacaacgcgacttcacctgctgcgttaatgttcgccaggatctgggatgccgctgctgccggacgtagttcctcaaaggcaacacggcgcgtgcgtgcggtgcatccaagcacaaaggtgcaatcggccacggcatcggccagtacggtatgcacggaggcggcctccaggacatcttcagcgcctgccgaacgccggtaagcatgttcatcgagctggcattcgggcgcaaccaggaccaaacgcgatatccccatcgtcttcatagcgcgggcagccgcaccgatgttgcctggatgttgggtaccgacaaggacaaaacgcagacgagggaatgcaaacatcgtgagggagaccaaagaagtgtagcgctgcatggtaaactgcccgacgggcgacgcactggattgttcctcctcccccctactcaactatccactcttctcacgtgacgagagtctccaggcatgcagaaacccgcggttaacatcatggtcaaagccgctcgttccgccggcaacgtcctattgcgacacatcaataaattagaaacgctgcatgtcatccaaaaaagccgtatggactatgccagcgacgtggatgagatggctgaaaaggtcattgtcaaggaactcaagcgggcctatccggagtacggcattctcggcgaggaagggggactgcagggcaatcatcggatcatgtgggtgattgatccactggacggtaccagtaactacttgcgtggtttccctcattactgcatctccatcgctttggtcgaaaacggtgaaccaacagatgctgtcatttttgacccgctgcgcaacgagctgttcactgccagccgtggcgctggtgcaatcctcaatgaacgcaagatccgcgtggcgaaccgtaaagatttgaacggtacgatgctgaacaccggtttctcaccacgggaacgcagccgtgctcatgcgcagttgaaatgtgtggatgcgttgctgatgcaggccgaagatatccgccgtagcggttcggccgctctggacttggcctacgttgcttgtggccgtgcagatgcttacttcgaggctggaataaaggtgtgggatgtcgctgcgggaatgttgttagtccgcgaagccgggggttacgtatgcgacttcaagggtgctgatgcgccccgcatggatgataaaggaccggagagctgccagttggtcgcaggcaatatcaaagtggcccacgcgctgcaacaagtcattgtcagcagtggttacgggcgggagttcgatccgaagcgctgattcggcatggttctcttggaacgttcgtaaggttgggatgcaagatcgcatcggtgacacagtccctgttgcgggggcaacgtcgtactgcaagctacagacaggggctacggataaacaggaactgcggatatgctgggaggcttttccatttcactcggcacagtgcatgtccttgtctgctttctatgtcaccggcaccgatactggtatcggaaaaacctttgtcagttgtattttgctgcatatgctgcgcgggcgcgggcaacgcgcggtaggtatgaagcccgtcgccagcggttgtacgtatagcgatactgggtggcggaacgaagatgccctagcactgcaagccgccagcgatccgacgcctgcctacgatctgatcaatccctacgcacttcccgccgcagtggcacccgagatcgcggcaatcgaggctggggtcactgtggcgctggaaccgctgagtgccgcattcactcagttacgcgcacaggcggatgtggtggtggtcgagggagtgggtggctgggctacaccgctaaacgccaccattgatcaagccaccttggtacgcgctctagagatacccgtcgtgctggtcgtcgggctgcgtctgggctgtctgaatcacgcgcgcctaagtacaacggcgatcatggctgacgggctgcgctgtatcggctggatcgctaacaccatcgacccacacatggcacgtattgaagagaatctggctctgttacgccaacgcctgccaatcccctactgggggcacctaccgcatatccccccagggataaacccggccacattggccgcacggctacatccacagggggattgaaccattggcacgctgtcatgctaaagcagcattgcgggttgaatccaaatagggatcacgttgcgattcggaagatcttgatgccaacacggctaaaagaaaccgttccaaaggtgatccggcacacgatggctaccgagctacgctcggcaggcgtggctgcacaagacattcaaggaatgctggggcaccgtgcctatggtggaactacggatgtttacgccaagtaccggcctgactatatggccgatgctgttcgggccattgatgcgtacatggagcgcttgcgtgttagttgcgtgtcagtcaataaaccacagattgcgcaacctattgattttattggtgggcgatgcagggttcgaacctgcgacccttgccgtgtgaaggtagatgaagattagcagaatcaacaacatagacgtaatacaaactactttgagcctcacaaaaatgcggctttcagccgcagtgcgtgttagttgcgtgtcagtctctgcggtctgcacatacctgaggagtgaacatggataaggcgtcttgtggtaacccctctgccaagtggataaggtgccggtagaggcgctgctccagcgccacgcgggtggagcggcctcaatggccccgcgtccggcaaggattaagatgcctcatgaagcgggacggtggtatcagagaatgccgcattgcggtatcagaaaatgcgaaactgatagtaggtccctatgttttctgatgatgggtgctggagtggcgtacgacttgatcgcgtacttgcgtgttgatggcggcagcaacctctggatggctgttgggccgctcggcttcgacgctacatcggtagccgtttttgtctaggcaatgttgcacacgggtgacgagccaatcaccattaactccttcccgccagccgttgagtgtcaagacggcttctgcggacagctccgcacgccctgccatctctagagtgagtttggtttcagcacgggcgcggcgtgacagttcaccccgagcggcggcgatggcggcagcagcatcaggcaggtattgtttgatgcggtgaacgggatgcccgtcgccgacgctgacttgatgcagttcagcgcggcgtgccagacggtagaaggcaaccactgtgccggggctgtcccgcgttgcgtaggtcatttgccaggaggcaatctcatcaggtgtcaaggtgatgcgcggcatatcaatgcctgtgacgcttttagactcaccgcgtttggcaaaaatcagtcggcctccggcaggtttagcaatcgcatcgtaccgctgtgctagccgtagcaggacgttgatatctgattcttctgtctgatcaatgtgtggtaatgccacgcctgatagtgacggggagatcgcggaggtcatgccatgttcggcagccattgtggacagcatggcaccgagtgtggttccggcaggccaggagcgggttttttgggtttgcaggtcacttttgcctttaggggtgccttcccagggggcagcgtgggcgcgcagggtcattgtggcgggccatccggacaattggatttcgctacacacaaaaacgcccatcgggcgtaattggccgtcgtagcctaatgccagttccagttccgcccccatcggtggcagtttgagcggggcgttaggcagatgatcagccaggaccacttccaaggtgtcggcatggcttccggactcatcagacagctgtaggcttgccatgcgtgcggtgatgagggcggtaatatcgttgtcgttggcgatgagccggtaggagggcgtcactcccacaatgcgactcctggaagggtgtgcggtgtggccgcagggtctggcaaggtgatcgcgatggcttctggcagcacgggcccccaggcggctaagccgtggtttgcttcatagatcgccgagatgatggcggtatcggtgcgtgcgtaatacttccatgcgagccaatcgacggtgtcaccgtggcgtgtgcgatagatgtgcaggctcacggggtggcctctacggcctggtcgtcgttgacgcgttgtaaggcgagtgtgaattcaatgcgccgtggtgtgccgttggggtgatggttgctttggcgttcttcaatgcgttcgatgacataccagccgtggatgacgccattgctatcaatgagctgtaaggggttgccctgggcggccaaggcgcgtaattcgtccaatgaggcgcgttggccttgccaatctgggtaggcaataccgggcaactcgatactttcctcccctgggccggtgtattggcgcgcatcgcgctgcccatagcgttcgatggcggcccagcggtattcgttcacgcgggcgagttcttggtagacgaggctagccagtgagaaggtgtagccgcctagcatcatcaggacaggccggttgccgctggtgttggtttggaatgcgttttgcaggggggcggcgacagtgttccacagggtgtgacggatcattctcggcctctggcatcgtcgtacagggcgctgcgtggtggcctctgtgatgggttggattgcgcggcaatgcggcgtgctagggtttcgccacgttcgcctggttgttgggtgatgttgtaggtggcgtagctacggtaatccgcgttatttgtcctatgctgttgcgccaatggtggcatgcgcaccgttgctgtgggggctgcgcctgcacctgcggtagcaatggtgcgttgggtcaggctgtcgccgatgcctaaccattgcttcattgtggtgaacttttcggtggcccaattccatagtgatttgagtttgtcgaagaaggctgtagcgatggtgccgacgccatcaaacatggttttgaatccgtttttcacacggtcgaagttgccggtgaaaatgcctgtaatcccattccaggcaccgctgaagatcgttttgacatcctcccatagagaagtcatccacggtttgatggtgttccagtgttggatgatcagcaacgcacctgaagcaatcgcggtgacggccagtcccaccggattcatgagcaacgcccggcccatccacagtgccgcgcggccagcggccataaacgctacaggtaacaggcggcctagcacgcgctccacggccagcgctgcggtgcgtacttgggccatagacgccaaggtgccgacagcccgccatgaggcgatcaggcgtagtccgagcaacagggggtattgaagggcggcaaaggcaaagcgcagggcgatgacggcgactctgaaaccggccaaggccagggcggttcccagcactgctttcactacgccgggatgtttttgtgtccatgctgcaaatcgctcaatgaccggagccgaggacgctaacaggtcgttgatggcaggcagtaaggcgttaccaatggctacggaaagctcggtgaggcgattttttgtcatttgccattgtcctgctgtggagtcctgccaagatttgaactcccgcgacatgctgcctttggcggcttcgccattggcaagcgccagttggcggcggtattcatccacaccgttcgccagcttggcaatggcaccgccccagtctttgccgaacaggcgtgtgacggcctccatttgctgttcaacaggaagtttcttaatgcgtgtgagaacgtcgagaatcatggactgaggatcggtgaccattcctttttggagttggtcagcggtcatgcccaccatccccacgccgatctggaagcgtttggggttcattttggcaatttgtaattgccgtagcagtccagaggcggcggtatcagcgcgttcggcggattcgcccagggtgaggaaggtagacgccagcgccgccgcatttttggcggataagcccatggtggaggccgctccggccaaatcgccctgcatcactttgatgatgtcgccacctttagagatggcgttgtcatcgaggtagttgatggcgtcgcccaaacgctcaatgtcgctgatcgggattttaaaaatgccagcgatttttcccatgttgtcggccagttcatcagcaggcatctcaaaggcggtggccgccatggccgagacgcgcgtaaattcgatcagtgtttttcttgcctgttccgggttcatgccttcggcaatgcccatacgggcaccggcggtcaccatgtcggccagttcattggtggccatcgggatcgtacgcgcgagctgctggatggcgttgcccatgtcctcatacacagaggtcaacttgccggtagggtcgcgtgcgccatcgacttgcttgacaatgccaagcatggcggtttcaaactcaaccgccgccttgatgggaaaaaacgcggcagccgagacggcccccaaggtccctacagcccccccgagctgtccgcgcgtctgcgaaaggtgggcgcgatttgcttgaagtgcggcttgtgcttggttgagccgctgttgcgcggcgcgggtgcgttctaattgtctggttaatgccgcataccgggtgcgcagtccatcgacattgcgccccatgcgcccaaaggtgtgaatgccttgcccgagcagacgttgctgccgcgagagtgtggtgaccgccgcgccaatccgttgtacgttgcgctgtgtggacccgaaggcgctttttaatgtgctggacaggtgcccagcaatgatcaggcttgcgtggaattgttttttactcgccatcgcgcggtaatccgtcgatccagaataggaattcacgcgttgggagcgcgagaatgtccacgagcgaccatcctgtatgtgaggctagggccagaacgccttggcggagttcctccagcgttagcctcactcgataaaaatcagaaaggcctcctgtagccgtttgtagttacgcaggctgaaggtttctaaggcttcgggggccacttccagaaggttggagaagatacgcaattcgcgttcgccttcgttgcctgggagtgcaaaggagcgtttcatatcccctgcggtcggttcgcgcatccatagttcattgacggtggtgccattgatgctgacgggtgaggcgaaggtgatgcgtacgccgccttctgcttcgcggaggtacggtttatcagtggtcggtccggtcatggttagagtcctagtgcgttgcgagcgggggcgagcagatcaatgccgttttgctggaagatcatgttttctacgtcgatttcatgaatgacggtggcgttgtgtacttctttgtagtagctcagtgccaaggccagttttagggtggatttgtcagccggtttccaggtgccgcgatcgatttctttgactttgccgcgcagatggatcgcaagggttgttgtcgtcccatcgaaggattccagaaagccacgcacggtgcagttcacctgctttccttcggtgacgccgaacagcaggagtgcgtcgctgctgtagcagatcaagctgacatcggtttcgagcttctccatgcccatcgtgagttccacaggggccagcatgccgccaccccggaactcttcggtttttaaggtcaatttgggcaggttgatgtcttcgacctgccctgcatagcctttgccatcaataaacaggttgaggtgtttgaggagatgacgcggtgcggacattagaacacctccacaagataatcactggtgagccgactacggaaggtgatgtgttcggcgggataggcgggggtgaagtcgaaattaaaatagacgtgcccggcggtgatggcgtcttttgtattgagttccggatcggcccagcatcggccattaataatcgcgcccaggcttttcagtcgtcgcagataggcattgacgccttcctcaacatcactggcgtatgttttggtaatggagcgatccaccgcccacagatgggccgcttgtaagctatcggcgatgatatcggcgatgcggaccacgcagaggtaggtccacttgggatcgctggataaggtgcggtttccccataatcggtagccgtcatgacgaatgatggtggcaatctttttttcattgagcagattggcgcggctggtggcatcgcccaatgcgaaatcaatggggcgtgaggtgccaagaatgccgttgatggggtgattggagggggaccaccaccagccattgcggttatctatcttggcgatgagtccggccaccgcagcgctgctgtaggcggtgatggtggtgccatcgggtcctagtgtggtgatccgcggatcgaccagaaacacgcgtttgctgccaaagtccccggcataagcaatggcctgtgcatcagtggtgcccgggccgtcagcaatgatgatggcacgcagtcgctcggcaatgccgatcaattcggacacaacggggttggcctgtgtctgttctgggcgctggtgggtcaagcctggagcaatcagcaggcgcggtttgtagccggtgatgttttcggcagccagcagcgcatggacgccttcataggtgccggtggcggcgtggatgccaccgacggcatgagacagccgctcggtgtcattaacgctatcttcaatacgcaccacaatcacggctgcgccaatctgatcaaaaatgctgtccatggcctggggcaaggtgcctgctgtccctagtgtggctgccatcgcggttgatcctgggatcagcacgggggtgttgaggggatagatggtggcgtcggccagaggcgcagtgcccaccaggccaatgacgctgctcgaggccgtttggatcacgcgtgcgccatcgtcgatctccagcacttcaacgccatgtagatagtgttccgccatcaggcccctcatctgctgtaagacggggagatgatcggtgcgacagctgtttgctgtcctgtggctatttttccgtggggtgtgacgcgccggtcagtgcgttcactttggcggacagctgtgcaatggcattcaccagcacgggcaggagttggtccaggttgaccgaggggacgtaagcaccctggaagtgaacaccttcagggttgaccgtttccggcatcagctcgagtagttgttctgcctctaaaaataggcggcggcgtccgtcgggggtgtaggccggtttgtagcgtccaatcaggggggtcagttgttcaatctctgccaggccatacggcagggggccttcaatgtctttgagttttcgggaggagccttgggcgtagccgcctgccgagacgatagtgcctttcacggatagattgccattgtcttccagtgccatcagttgcgcttcattggtaccgccgctgccgccgctgtcgctgcgtctccagaaaaaggcgtgacctccgttctttttgtaaaaggcaacgtgggtcgtgtcgtgttgttgatagaagtaattgcctgccgtttcaatccacagtaagcccgttttggcaccaatcactgtgctggtgtttttggtgctggtgccgaaatagcaatggttgctggtgccaaagaacagttgtgcgatggctggggaggtgccgctgcggaaggtggccgcgtaggggatattgttgtcccagaattcgcaatcgttaccgattttcagtgccggaatgcgtccgttacccagtgcgtctccaatcaaggtgccttgggactggagcgagccggtcatgaggctgcccgtttttttcaccagagtatctaggtgtgaggccagctcagggaggtcgctgctggcgtgctggtgggggctgggcggataggtctgtggggtgttctggaggtttctccattgcaggtagtaggtgccgtgatagccgtcgagtaaatctgcatccaatcctttttctgatccggtgtccatcacggcagcatcgcccaggcctagaaggtgacggagggcgggcgcatcggcgctggccatcagtgttttagcgtagtcggaaggggcggcttcgcctaggcggtgatccagggtggctttcaatgtggcaggcgctacggcgctgcgatcctccaggcccgcgatggcttgggcgttgctggacaaggtaaggacgcctgccactgtctgtgtcgccggagggttgttccaggaggtgtcaccgaaggagagttgagtcgcatcggtatccacaaaccgaacatcaatcgccagcaggagcatggccgatgcggatttactgagaatgatgtcctgttgggagtaggtggcaaataaggtgccatcctccaggtagacaccaaagccgcggatgtcgtactggtcggcggttgcatcgcggatggtgatgtgaatagtgtctgcggccaccacgccaccggagaaggtggttaggcgtttggattcctcaggcatcgttgccgcggcggggtcaaagtgttgcgcggtcaggccgacagaagccagccgcaccgggacggtgccatgatgctcggcgttcaccagggcggcgcggccctgtggggtgatggtgatctggagtggggtcatggcatcctcatgtggcctgtgcaaggtgtaagcgtcggtacgcggtgatctgtgcgccacccagcaggccaatctgtccgatggtgtgcacgccttgggtaaaggtgaaatggctgcgaacgggtttggtgcggatcacttctgtaatgacatctgcaacaaattcggcagttgtctgactaccgccctgccctgataaggtaagcagcagtgtgaaggtgtgcggtgcggcgggtgggttttgttgccaccactcggtgatgaggacatccccgccaaagctgcgcaccacatcgcgcacacttttgacgctgcctttacaacgctgaatctcgatggccgccgcaatacgcgcgcgtttgatatgcacgggccacgtgctgcgccaggtgtccacggacaatgaccaggccagccaggggagcaatggctcggggcacgtgtgcgggtcccatagttgtttgaatggaatcgggatgtcggccaggcgtgccatcacctgctccagggtgcgcatgagcggcgtggccgtggggggcagcaggctgtgcagagggtcattcatccacacccccatgcacgacggtgatgttggtgcagcgggccgcctgggtacggtccatcgtcagtccctgttgtggtgtgagcagttctacgcgttgaatgccttcaacatgcagtccggcatacaggccactgatggcaatatcacggcctaagcggaatgcgtctgtggtgtaggcagtgatgcggcgctgtgcttcggacaggacgaccgctgcatccggtccggcgtaggtgtgcaatcgtgcgtggacttggtagtcagtgatctgtgccggttgtacggtgacatgatcggtcatcggtcgtactgattcttggttaaccgccgccatcacggcgtcaagtacgtcttgtgaaggctgtccgttggcgctgcgtgatagcacggtgatgatgacgtccccaggggttggactggtggcactgacgtcacgcacgtcggcatgggcgctgatggcatggtagatgtaagcgccttctggaccggcgacgctgtagccttccggtgcaaggacgatacgccgccggaaggcggcatcactctccatcgtcggggcaatgcccttagaggggtcacctgcatccagcatgaggcgcttgacgcggaataatgcggctaaattgtccaggtcggcatcgctggccaaggccaccatcacggctttggcatcttcgttgctttggtagcggcgcacggcttcgcggtaggcggccacttccagcagggtgtagatggggtctgagggcaggaggtctttcagggtcggatcacgtgccgccagatcagccagcatttcttgcaaaatcacgtctgcggccacttgccggataacatccggcatgggcagcttggagatatcaatggcggtcagggtgttatccatcagcgcacctggatgccgtccagggtgacggttttgcccgcaggcaggtactgggcgatcaggtccaggatgaccgtgcccgatgcggtggcgcgggccgtcacttggcgcagtctgatccgtggttcgtgggcggcaagggcttgtgcggtggccgcgtacagttccatttctagggcgcgggtgatcggggcgtcaagcaggtgcggtagcctgctgccgtaatcacggcgcatgatccggctccccaagggggtgctcaagatgttctgcaccgattggcgcaggtggtcgatgccatcaagcggctttccggtgtgcatgttcattccgcgcatactcagcagcttggggggactcaccgggcggtgtcctgtggcgggttttccgaaggctcaagaaactaatgcaacagcggaattaatgaaggtgaaaggttctgataacgtcgtctcaggaaacggatcgcaacgcacgtcgcacgttaagcaggaattgctgaaaatctcaaaattaacctacttgataaattaacctaataagttaaaatggtgcatggagaaaggcacaccccactacaagctaccagtcgtcaaagccttggtaaaagctggcaaggtcagggctacagcgaccgcctaccaaggagcacgtgagcttggcatcaaagatttaactggaatgtgcaccgttgtcttggcgctcacgtctgccgacttctacaagagcatgacgacctacgcggatcacacagtattccaggatgtgtaccacgccaagacggcaagcggtgatgaggtgtacctgaagttaactgtcattgatgacgtgttgattgtttccttcaaggagttatgaccatgagatgtccatgctgcggcgcggcagaactgatccacgacacgcgcgacatgctttacacctataagagcgaaactactagtatcccaacggtgaccggcgacttctgcccggcgtgtggcgaagtcgtcttggaccgtgaacatggtgatcgttacagcgaattggtcggcttgttccaacgtcaggtgaattcggcctacgtcgatcctggttacattaccaagatacgccggaagcttgatctcgaccagcggcaagctgccgaactgttcggtggtggtgttaatgctttctcacgttacgagaacggtaaaaccaagccgccgctgtctttggttaagttattcaagcttctggatcgccaccccgatttgctcaacgaagtgaagagtttctaaccgttaaaaggtactggcttgaacagtcaatggtcgcgatcgcctcacgttcgcttttgttcgagcgcctacccctgcgctggggtggtgggtgcattgggtccttgggccgtatggtggtgacgttgtaggccaatgcctgcggcggtgatgtcgccttgtgcgtgaatggtgccgtctacggtgaggttgccggtgaggtggaggctgggtgtgtccaaggtgaggcggtcgctagcggtgagggtggcggtggcgcagatcagggtgacggtgccggatgcggcggaggcatccacggtcagggtgtgggcttggcggtcgtaggtgatgcgtgtgccgtcgccaaacagcaggcagggctgatgggcggtgctgctgggcgcggggaaggtctcttggtagaggctgccaggcaagacgatgcccagtgctgaatccccattggggcacagtgcaatgacttgttcgcccaggtgcggcagccaccaggagcggtcggctccggcacgtgaggccatcaccggcagccagccagtgagcagttctccggcttcaatccgcacgcaggcggtcgcagggtccagcgcggcgacggtcccttggaggatcaggtgtgttaattggcgggtgtgttcgttgagtgtctgtctcacggggcgatctggttgtagttgtcttggaaggaggggccggtctgcggtgtgaaggacagccataggtgggtgggcagggtgcctgcatgggtccaggcgctgttaccaagaaagactggttgttgccattccacggtccagacgacgtatcgatctaattcggcgttaaattcgtctgggtagatggcaatcacgcgacacggatcggtcggtatgccacgccagcggcgctggtacagccaggtgcccagggcggcggcggccagacgtgcttgcaggtgggtggtggggtcgcggtgccctaggacaagccgtgcctgaaaacgcagcagggcggggaattgtccggtgcctgcatcgttttcgggggcgggttcgatctcgctcagggtcagtaaacaggcgggcatgggcaattggtggtcttcatcgtcctggtaaaaggtcacggtggccaggtctgggaattgcgctgcaatttggtcgcggatggcggtatgcagggcgtccaggcttatgtcggtgtgcgtgtccgccattgcagttcgtgctcaaacagggtgtaaaagcgtgcttcaaaggaggctgtgtcaagaaggccgttttcaatataggtgatggagggggcgtaaatgtccgctgtttgaacggccacggggtagcgggcgcggcccaggcgtttgagtacctgccgtttgccgcgcactgtggcgatgaatgcgcctttgatctgacgtccgccaagggcgctgacgccgctagcggtggctttggggttcagccataggagggggacggggttcaggccgtaccacactttcatctggtcgcgttgtcgataggtgcgcaggcggcggcgcacgatcttttgttggagttgcaatgcatcgctcagcccacgcacggagcgggtacgcagccaggccgccattttgatgctggccgaacgtagggcctgttgcatctgggtttccgtggcgttgagtgcttgcgcgatggcggtgaggctatgggtgtggatgtggacgccaatcatgggggcaccatcggggccagccgcacgagggccatgccggttccatccggttgtgggtcgtgggtgaggcggtagtggcgatcttcaatgcgggcgtagtcatgttttttgaagcccataacatcggtctctttgcaggtaaaggagggttccggggcgttcattctgtagtcgccgatgtccgcatcaatgtaggtcgcgtcaaaaacaatggtgcattcatggacgcgccccgttttctccgagtgcaactgggctgtcacggcaaaatcatcggtttctaggaaggcgtctagatcgtcccagcaggggtggtgcatcaacggcgaccgccgcgttgggatggcttctcattggtttctgtacgggtcaacgtgttgggcgtgggcgtttcgccgctgggtgggtcgatgatcacccccacggggccatcggcatcaccggcaagctcagcacggccacggcgcattaaatcgtgcgccagtgccgtagggacctggacgattgtgccagggcggtaaatcaggccttggatcaccaccgcagcgctgattttgagggtgtttgtcgtcgtcgacatggtgtgttccttaagggtcaggcggctgcgccgtagcagaagctttcggtacgacggatgttaaagtcgacgtcttggaacacgacaatccgggtgccgccgctggtgctgaggctgtaggggtcaacggtgatatctaagcctccccacatggcaatgatgaggtccgcccagttcccaaagaagacatcaccggccttaatctggttggacacgctggcggggtagccgttgacggtgttgccggattcccaaatcgtgccgctggcggcggtctggggaaacttcaaggccgttttggcatagccacgtatccctgcattgaaggcgtaggacatggcgttcacatctgcgttgttcagtgcaatttgcgtttccatctggacaagttcagcaaatgtgggttgccctttttgtgcaaaggacacggcgttaatgccgctgtggtgtttaacgcctgtgggttgcatatccgagccgctgccgtagatggcggcacggtccacttccagggccatgacgttcaggaggtcgctgcggacgatttgttcggcatccggggtggattgcaagagcagacgccgggtgatgtcggtataggcggccagggatttgggggtgaagtggatttggtccagggcaggtttgcttttttccggtgagtcgccctcccccacccagtaggcttgggtggtgcctttctgcctaggaatatcgacgttgcccaccaggccgcccatcacggtagcgcgctgcatgacccaggttttattacgcaggatttcgataaaggaggaggcgtgcagttcggtggcaatgatgttgccgccggggccgtccgtcggggtggtggtggagaaggcgcggttcaggacgtccgaggggatcagcaggccgcgcgcctgtttgccgtaggttttttctgcggcggcggagcaggcaatctcgaaggccgccgcgttgcggtcggtctggctggcattaggcaataacgcgcggaccgcgcggacgatgctgtagtgccgtatttcttgtgtggacaggccgatgccggtgtcagtgtcggtctgtggttcggattgaggcatggatgctttgtccgtcagttttgtcagtaaggcgcgctggaatgcttccggtgagtggccttgggtaatgtagtcatgcgctagttccaagtgcccgtaggttttgccaaggtccgcaatgtgtctgacacgggtccgctcggcatcgacgccgttgagggtgccggtatcgttggatgtcggctggggcgtgctggtggtgtcggcatgggtggggggtgatggttccgtcatggtttggtcctcaggggtgcatggagtgtgtggtgcggcggcgggggtgtcctgtggcggattttccaaggcgcgcccgatgccgacggaagggtcggcagggatgctgacaatggagatttcaatgggttcccagtccgtggcgcggtatagggggcacccgtcgcgttggccgatcacttcgacttgatgcaccaaatagcccactgagacgtgtttacggatgccgtccaggacatctcgtaagatttcttcagcacgtgggctgcgcccgaagcgcacgatggcgcgtccgcggtggtcgctgtcaatagaggccgattcgacaacgccaatctgatcgcgcgggttgtggtccaggagtaaggcggcaccgttgtcaagacggtgcaggcgcacttcgccggggcggtggccgagaatctccacgccggaccatgtctttacttctgctgattcgctgctaaatgcaagttcaagggttctggcgggtgcgtctatcgacaggacgtcggcatggcggtactgggtgccgcctttgcgaaggtcccgtactacctcagtggctgtgttcatggggggtgggttccttctcggtcggtgtggcgttggcgacagtgaggtctgcgccatacagcaggtacttgaggtagtcgttggggatgccggaggcttgcatttctttcaggtcctgggcgatttcgcgaaagacgtcctgggggtcgcggccttgttccaggatcacttggctggtggaggtcaggccgccacggatgcaggtcagtgcgctttcaacgtcggcgcgggggtcaacccaggcccagcggcggccttgccatgaaacgcggcggtatcggtcgtagtgttcggcaggcagcggtttgccatggacgcgaatctgtccgctcagcaatgccactttcaaggccgcttcaaaaacaggggtgtggagggattcgataaaaaattgctggtcttctttccagcgttcgcgttcatccaatgtgccttggcggatgctggagtagttgacgtccgccagatcgccggagagggcgtggtaggagacatccatgcccgcggccaagctttgtttggcggctttggtgaataagccaaattcccctgaggggtattgcggattccagtcttgaatatctccgcctgcgggtaattcatggaacgacagtggcccggcgttcatctggattgtttgggcaacgttttcatgttcgtcggctcgcgctccaaaaccttcctggtatttaataaagcccattttgctcgcggcggcgcgtgcattttgtacggcggcttcttcaaagccttgtaaatggtgcagacgcagtagggaggtggcggcccaaggcaggccgcggcgttgccccaccatcacgggtttgaaaatgtggatgacttcctcagcgggcacgcggacgtagcctcgtccattgatgctgtagtagtaggtgtcacgttcgtcaatggagctgaagtgataggccagtggttttccgaatcggttaaattcaatgccttgccggacaaatccgccggtttggtcggttttcagcatttggtagcgcacgggtaggcgcaaggggtcaatcagttgtaagcaaaagccatgcggtccggcgtgtgtgccataaatttttctggcaatacactctccatcacgggcgcaggtctcgacgcagagggtttggatttcacgccatgataattttccggtgacgtcacaatggcctttgcggccccagtcttgccaccaggtttcaatggcgtcgttgatggtggtgtccagggcaccgctgcgcgattttctgctttgggcctgcatgacgatgccgcgaggacccacaatgttacggcggcataggtcaatgtaccgtttgacatggtcgttgttggaccattgttcgcgcatgcgcgcgaccaggattggaagacgttgggtgatgtattcgtccggggagacggggatgctgctccacaggtcattggcatccacttgtccggctttgaacatgccgcctaggggcagcaggcgctgataccagcgccgcggggggtggtttggctggggtgttgcggtgtctggggtggggtgatctggatgggctgtgcgctgtgtccaccatgtccagaggttcatcctacaaacctcacaggaacgacgttcccccagcggggggtatcggtgggtgtttcgcgctgtacggcaacggcgtagaaggtgcgcagtttcagtaattcggcgatgggggtgcgccacagttcgcggttgttgatgcggtagcgctgttggtcctgggtggcgcgtttttgcaggacggcgttgatggcatctaaggcgcgttggttgtcgctgcgcccgtcatagccttggggcagcgatgcaaagtccggttctacacggaatttcccacgttttagttcgatggtgtggggactgtgtgctgcacgcagttggtagacgtaatcgccgggtgtccactgtgcagtgtccgcagcggggatgtcgaagcggtgggtggtgttttcaccctgggcgatgaggtccagtgatgccggaccacgcagcaggcaatggagtgtccagtcgggccaggggtagtctttgagtgcaaaggcgatctgtaatgagcatccagcattgatcttggcagggaatgttgggcagcggtgctggaatgtcatgggtcaccagtcgttagcccatgttctccggctttttaaggggtgccgggggcgttgggggcggaaatgaggggtatggtgttgcacttctggggtggggtcctgtggcggtttttcctcgggcaataaggcggcggcgtccttcatacgcttggcctcatggggtagatgcgggttgatgattttgagggcggcgtaggcgtagacgcggcaatccaatgcttcgttgggggttttgtcgggtttggtccattggcgtactggctggcctttgaggtagcgggtgcgcaatttctcagcggtcagttgtgcaaaccagtcgggggaacggtctgcggggaaatgggagtagcctgggccgggctgggtgatggcaaggcggcgcatcacaattaattttgcttcgtccacgccaacggtaaagaggttgattctgggggcgttgcgtccggaatgtttgcgttgtgctttgtctacgatgggacggccccagccgccaacgcctttaatgccaaagaggcgtctgcctgtcctggtacgcaggtattggtaagcggcttgggtgtagccggaggtgcctccggtatctaagcaggcagcctggatggatagacgtaggccgctttcgtgctgccaggtggtagagaggtagcggtccagtgcgtcccagacgtcgcctaagaggggatcgccgtagagaacggcggtatggatggaccaggattcttcgtcaatgccccatgcgacaatttccacttcaaggcggtcggtttgcatgtcaatacccgcagtgagaaagacgccgcccatggggacatcggcaaggtaggtttcaaggcggcgcagtaggtcgtcaatgtcggcctgttcggcggtctcgctccatacgcgggccaggctgacgttggtgaatgtttgtaggtcctggtgtttgagtttgtccaggtagtcttgaacgatggcgctttggcggcggaaggtggagtagagttcgttcagttcgtaggaggcatggccgttaaagggtttgctggcctgccagcgggcttggcgaacggctgcaatgcgttggccgtcatcccagcatacgccgcacccttggcagacgtagcgtgcagtgtgcggttgatgggcgtcgatagcggccaaatcggcgtcggggtcgctttggcgtccaacccagctgacgtgttcccattctagggtttgttcgtatccgcaggcggggcagcgtacataaaatcgcctctggtctccggcccggtaggcgtcatcgatatagctggcaccttcaatggtgggtgtgctgatctccagaagaaaccgttcatcgccaaaggtcgcggcgcgctgccacaacaagctcaccgggtggccttcgtccgtgcgttcgtagccgtcgatttcgtcgcacacaatcagtggagctgagcgcccgcgcatggtctttggggagcctgaccaggcaaacatcagaaatcctccagggtaggatttcatccgctggttgttgacgccatcgcgaccacgtggttttgcaatgaggtgttgcaatccttggttggctgcaatcagcggggagaatttggtttctagccaggcttgtaaatcgccttgggagggttgcagcatcatttggctgcggggggccatttcgatgcagtagccttgtacgcataaggccagcatggttttaccgacttgtgcgccccatttcagggtgacgcggtagcagtccgggtccaccagcatatccatcggttcgcgttggtagggggcgttgtcgaggcgcaaggggccaggaatggcgttgccttcaggaatgcggatgcgtgtctgtgcccattcggaaggcttcattgctgggggtggtcgcagcatctgtaaggcgttgctgatcatctgatcgacgccttcttggttttctagggcggttaaaccaaaggtttcagacatcgcctgtttcctcgtcctcgtcttcgtcggcgtccgtgtcttcttgggtcaggtccaaggacgcgagattttctaaggtctgatcaatttcttgcagcagcacgcgtttgtagcggcgctcgtcggtttcacccagtaggagggcgacggtccgccctggaatagtgcgtaggttggcacgcacttccgcgaagacgcgggccaatgtcttttccacctgctccaaaggagcaacctgcttttttgcatcagccaagtgcaactcttcacgttgcgcttcagcggcgatcttgcggcgcttccattcttcaatatcggccaccgcttcacccgccgcttcttctgcggctttgtcacgtaaccagcgggcaactacagccgtgtcaaacgcccattcccgcccacgcccaccgcgtttcacgaccgggcagccgttacgtgcccattgatcgaccgtcggcaacgctacaccgaatatctccgaaaggcctgcacgattaacctgttttccttgttgcttctgtaaaaccatcggtcgatataaacaacaagtgagaattaaaatgccacgcacaatggaagcttcgcggagtttcgaccccgcaggcctcccccatcaggaaggacccatgaaaatctgtcaaattgcagctaaattcgctcatttgacgcttccacatccaccagatgccactacaccatggtcacggtgaggtatcgctgtcttccattccgcagccatctgagaaccacggctgccccctccgtgccgcctgcacccatgccgcaacacagcgcacttgcgccgcacactgttcataggcaaaacgccatcccaatgtctggttcaacacatcgcggacggtctctacacgtggcaattccagcgcctcacacggctgcaacaacacctgcggcgggatgatcacctcaacgcggctttgcgtgagggtgactggcttgacaggaaccgccgtcgagcaagcacccaagtacatcaggcacatccatatccaaaaaagctttcgcctcatcgctgtgttgctccaaatgtgtgatgcgctgccgcaatgcccggtcgcgcaacgtgatccgattcagatcagactgcaaacccgacatcgcgcggctgtcaatctcccgtaaagtgcgtaaccgtccaattgcagcgtcttgctccatgttgatcgcgacctgcgcatccaacgtactctccaccgccgctaactggccttccagctgcgccgcccgctgcgctaattgactgcgctcggaccacgccagcaccgcatgcgcgaccaacgccaccaacgcaccaatcatcatgtactcaatcaacagccgcacactgggcaaacgtgttgcgacgcgacgcagtgtattaacgatcatccgaactccttctcccaccccccactttggggactatgaagctttgaattaggtctaaactggcagaggctccaagccaaccaaacacccccacagtgacggctgtcagttgctggcttaactccagagactcacacacccacatcgcaaacagccccaccagccccgccgcactggcttcgatcagcacacgcgcccaggttggtttctcaccgttgtctagagaacgcatcaggtagccaagtatccctgccaccatcgcaaggcacgtgtaaaacgcttctttccaccaggacatcatgctcgagggatcaatcacggcgaccctttaaagcagcacgccgttgcttctcttcagcacgccagtcactgccttcaaacaatgcacgttcggcggcacgtctgatgattaaaccagactgcatacgaccgcccgcccatttccacacatgaaattgctccaacgcaccagccacatcaccggcattgagccgctttagcaaggtcgagcggtggaacgcccccgcaccaatgttgaagctcagcgataccaacgcatcgaactgctgttgcttcagtggcacacgcacatcacgccgcaccgccggttcaaactctttggctaagcgtgcacgtaacatcgcatcggcttcctgctcattggcaagacacatatcaggcgtcacatgcttgcccgtctcgccatagccaatcgtcaacacgccaccaggacaggtgtacgggttcaacttgcaaccctcaaaaaacttgatcagtgcaataccttcttcaccaatggtctgcatgacacgtcccggagacattcattgccggtcatcctgcgcgtctcctcggcacacgtcctgtgacaggttttccgtgacgggtgccagggactacccccagcgaaattcctgacgtgcctgacactgatcccaaatatcgcggcaatgacatccaagggcacaccacgacgcaaaagccccacaactgcacaatcccgcgcatggcgggcaatgcaattgcaattggcgggctgcaaaatctccccaccgaaaacatccaccagcttttgtgcatccccccatcccagaatggataccaatcggtgatggggtgacaaaaccttagggacatacaaaatcaccttgccactgcggcggcctttgggatacgtacgcggcaactgaccaatcagggttaacgcttgctcccgtccgatgatatccgccaactcctgcacactggcaggcaacctggtagcgacggtgggcctcacgccgacccctacggtatccccacatcccacaacgcggggcttcccatccaaggacaaacgcgccagcaagcgaggcggattggagcgttgcagaaagcatgttgtttgcattggccactcacccatcacaaaaaagcatggggactagtataacccattgattgtaaagaatattattgggtgatgcggcgacgctttcttccgtcgggggggcagtggctagatgtacgggcgcgagaatggggtgactattaaggggtgcactagccacactgttattcgggtcaatttcctatttctccctatatacgctgtatattttttatacaatgagttgggacggataatagaaaaacataggcagaaacagtgagggtagtgcaaccttgcacttaatgcacttcaaaaacgtgcaatttcctgttaacccccgtgtatggtttacatattttatacaacgagtttagattgatatcgcaaaacgcaagtgtaagaagtgcaggggtgcgactgtaggcggtgcggctttaacaccctacaaaccctcggcatctcgctaacagccatttgcgagatgccgagggcgctgtacttcttttcgttacaggtcagcgcccgtcaacgcgatgccttgaataactagaaacatccggcgctttcccccttcaggggtttcatacacatgctttttcctaaacttcggcacgcaccgctccaattcgccaaggaaacggactttggatagcgcgtaaacaccgctgtctttgcaccattgcgtataggcagggtagaggccaccacccattggcgcggttagcttctcctcgtgctccattcctaatacgcactcatcgctaatgaactgagtaacgcggtcctgttccgtctgatagtccttggaagcgtcccgcacaatctccggagggttcaacccttccctgtaccactccaccgcccccgccacgagccacgccaagacgccttctcgttcagcggccagcttctcagtgatcttatgatctatggggtattgggcgatccccgcctctacctcttcagcggtgccgaagcgcgctttaaaggggatgagcatcaagcgactccagatgcccacgtcctgccctttgatcaccggcttatgattagtgagcagttgcagcttgtgcgtgggctggaaatcgaagaaatcggcacgcatatagcgcgccttgagcatatcgccaccagtggcttgcttcacgaagccttctcgcaagaggccgccttcgctggtttcattcaccgtcaccatgcgccgtcctaccaagtcggcgatctcggtagggtgccggtcgtgaccggcatccattaacagcccaggggcggccacgcccgcatagcggccaagaatccccgagatcaggtccagtagcgtgcttttcccattgcgacccatcccgtacatcacggccagcttatgctcacgcaccgagccggtggcacagtagccgaaccagcgttgcaggaagtcactgagtggctgctgggcctgcccctcttcgcaggtgatgcgttccagtgtctttctaaacacaggtgcagcggcatccggcgtgtagttaacgggaacgacccgcgtcatgtagtcctcagggcggtgcgctttgagcgttccggtgcgcaggtccacggtgccattggcacagttcaatagccaggggtccgtgtcgagttgtttgggcttcaccgcgatcatgcatttagccagcgccatcatcgcctcgacggtgctacgcatttctgatcgcttaccccatgcctccagtgcagcggcgatctttgcgtttttgcttttttccttctctgtgtcggcgcgtttggtgcgccattgctccacttcgccgcgaatgattttggagagttttaacgccagcaagcgcgctgcatccgtatcgtgtgcccagtgggtgccttcccagacgaaccagcgatcaccagacaccatgagccgtttgccgtagtgcttggcgatccgcactgcgttagccatgtcggtggtcaggtacagcgcttcgggcacgtcgtgccgctcaacggctagcgtggcaggcgcgtccgtgaggtcctcgaacatggctagcatttcctcatcggaatagattcctatctcgtgtagaaacgccgtttgtggcaaccctcggcagtgagcgtgctggcatacaaacgcgccattggcatagccgccggtatgtgcggggtagtacaccgtggcggtggggttagaggcttgcgtatgctgcttagccaaggggcattcgataaagagttcaccggccttaccgctcgataagatcattccgcgttcttcaagacgcacagccacagggtcgttggccgccgcagccatgagcttgtgttggcggctgggtttgccttcactcttggcgctttccaatatctctgcatcaatctccagcatcacagaatcatcaataaacccttgcacaaagccgctacgcactggcaccggatcggccacaccggcttcaaacacaggggcggcggtgtagtggatttgcaccgtattaaatacagaagcgtccagggctggagcgcaggcagtggcccaggctttgagctgtgcgctggtatacggcgtatgtagccagaaccacacatgagcctttagcttccctgcgcactcgccccgccccgcgctactggataactgccaatggtaatccgcacctgcgaagacatcgggaagatgcgcgtggatgaactcgtagatactccccaccggatcggtgactggatcgcggcgcaatggctcgaagttatcgatctcaacaagcatccagtgatgcggaatatcctcgtacagctcggcaatacgccgtgctttccctttctggaacgctgtatccagcgcagcggctttggtatcgcccacatacacgccacggatgacacaggcatgccggttatgctccagctccgtgagcagggcagacagctcgcggctattgttgagcggtcgttgctccacctcaaagaacttggcgttgtcgtaggctttcaccgtgccatcagcgcaccatgttttggcgagggtatttacggggtgttttaggattgtgatagaatcgctcatagttgagtccacctttgttttgggcgagttgaggtcaccccctcagcccgccctttttaactgcgggggtggtttacttattcaaaaacgactccttactaattaaggagtacggccagacagacagccgccggatggcttagcgcaaacggtgataggtaatccccctgaccttttgggggcctgttccatctgagggccgatggctttttctgagaacgctttactcatacgttcaatcgcggcttttgcgatatctggtagatgcttggtggggaacgttgggtgtctgacccaatcggctacttcgtcgctagtaagaacattggtatgcagcgtgacgggtgtcagccgtagcctgaagtcatgatcgaaatccagtacccagcgatgccatctcaatagttcgacgagtgccgaggtggcaattgcttcactatcttccaatccttttgggaattcaggctcttttattcctgcggactcaagtagccgtctgacatcgctaatccaacggctatgagcggtgtttaacgccgccatttgcttacggtctttggagtagctgcgcatctggtcgtatcccagatcaggatgaactgtgtactcgcacgtcttgcggatcgaggggaggacttccgaggttacccacttggagaacttacgtgcttctggctttctggagcggagtaccaaggcgtataggccagactcggaaatgatgatgactggcttcccagctaaacctaacgattggttagatttctcatcatcatctaaatgatcagcgactgccttgcttggattgcggtatcccaatgccgtacacacatcggtagcaacaaaccacggattgccatcgcgcatcacaacgcgcacagcgtgagaatgaaaatcgaacggaataatggactgcgacatagcgtgactcctgggggaagtggagtccgccgccacgcttctaaacatggaggcggacgacgcggagttagaagaccgaccccaggaccggtagactcgaaagtctctccacgccacccgccatagacgagttgcgctgtacgcaaggcccactgccgacggcagcgagcaatgaaaaagcgccaacatcggaaatgggcgcttttcgcgctggggattcaggcttctaaacccggcagcagattttgctgctgcatgggcagcctgcctcagatgtatgattggtgtcaagctcacggtgtcaccgtggctggcgggaatgagaagtagatcgaggtgtttcttacgcgccgcacccgtaggtgtcgggaggttaacaaccggacatagacggcgggcagctttcccctttgcagggtgttgtatcgctaccgccctcccgacgtaaaaacgtgcaggcgtaaaaaaaccgcatgggtttcgggtgcgggtaccgctatgtccggagttgttacgctccttaccagcgacggtaccgcagcggtgaatgtgggtcaagctcacggtgtcaccgtgactgtcggcgaagaagtgcctgcatctgctcatcaaaatcagtactcattgtgcgccctgttccagcggatgaaatctgtatagaaaaagatgctgcccgccctgcggtaaactgttgtcaccacaacgacagcccgtaaggagggcagcaatgcaagaagggaaaatccaggtcacaggctttgcatggtttaaagaagacgattacgaatcattcaagcccatccttcccgagcgccgttggcatcggacgtacgctgaatgggaagccgctgcggagcagcacttcaaacgcctcaatgaccagggcatcaggaccgtcaaggccgagatacgatccgctgacttcgttgcctggtgccggaggaccggccgcaatatcgataataaggcgcttgttgccctcgccaacgaggctgcctgccgggtcatcgaagggagccactgaaatatacatatcaacctttcctcttacggtcattcatacgggtcaagctcacgctgtcattgcttgctttcattcttgattccttgagggctttttaagtcccttcaaatggatcaccctgccttctccaagaggcgaatacccattcttggcccgtaacagataagcgtcctttagtgcgtgtttcgcagcgtgttctaccgcttcatcaacacaagccagtccatagatttgtgcgtattgctcaaatattttttgaacagccggtgttagatcaatcttcacagggcctccaaagggcctggtttggcacttcaagctgcgtctgcttgccgcttatcattttttatcgcagcagtggctaccgataacgccagttcacgaaccaacgccgctggttgcatcccgttgtattgagccaacgcattaatcaattcgcgctcggcatcgttaaaacgcacctttactgggtggctacgaatgtgggtcggatcggcatacatagattcattaccaagggttattcaatgtcattggaaagatcaaatacagcgcatcaaacggcacaccgtttgaatgagttacaaagatttgcgatttgctttgcaccaagagatgcaaggctggactgcgccaaaagacgctctttaagcaagggatcgtctattactgctgctttcaaccgcagcagttcggctttggcctggtattcctggacgcggagttcgtccatagaaacgggtacacgagcacgtgtccgttccaaaccatcacgccgcatcggacatctccgtaagtgcagagccaatcgaaattgggttggagccaacctgccggtagaattggtgtttccaatcaaccaaatcactaccggagatcggcatggaagaaaaagtattcgttgtagtactgcatacgaatgtagccttgagccaatttatcatcgggaaatttcgcccccaagatggccgttttggcagccgcgcgttttggatttgcacgcacgtggacatggaaaaccactacctttcagtagttctagaaggccaacccccgcccggagaaattcaaacccagccaaccgttttccacattccacacagtgcggttgcttgtgtaatcgaaaccaccagagacgcactacctttggtaatcgggaaagaaaagaagttgagaactcaggtttaggctgcatcggacacctcctgcctgtggtttgtgggggaagcgccgaagatgtcggggcggacaacctcaaggagctgaagccgtgccgaaggaatgcccgtcttacgccactcacttaccgatggctgtttgatcttaaacattcgtgccacagcagcagtgccaccaagggtatcgatgatctgatttgcgttcataccccttaagttaggactagctaatcactttgtcaatagctactcctaaccacttatttgttaggctttcctaatgtctcttaatgaacgactccgttttgccatgcttgaagctggcatgacgcaaaaacaacttgccgatgcagtcagggtcaaacctccgagcgttcatggctggctaagcgcgaaagcaaaattcttgcgcggggagaatctcctcaaagccgcccaggcgcttaatgtctcggaaaaatggctagcaacaggcaccggcccaatgcgtgccgttaccgcgaattcaaaccaagagactccaagcaaacaggattccaagcgtatcaaacttgacgcatgtgagctgcgagtaattgagagtgatgatgagttggaccctgaagcagatgttttgctcgacgaaatagatgtaatgcttgccgctggcaacggtattttgatacctgaattcgtcgaaacacaattcaaaatgccgttcccaatctcttggctcagggacgtacacattaattcaaaagatgtgaagttgatgcgcgtacatggcgacagtatggaacgcaccttgttcaataaggatcgagtaatggtgaacttcgctgatacacatgtccgcgatgggaaagtgtatgccatcgccattgacggtgaggcaaaggtcaagcggctctacaccttgcataacaacggcttacgcattgccagcgacaaccacgccagggactctgaaggccaccgtattcatgaagacaggaccatctctcctaaagagatcgggatcgttcaagtgattggccgcgtaatcggcaagatcggtgacggtggattgtagaaccccgtaaacctatataggaaaagggcaaaaagattttgagcaataaaccgaataagcctgcttcgccgccgccacctcctcctcgaagaactcgggagctgcctgtacgcgattcacccaatcaccagccacccccgccgccgccctcttcaacacggtagtgctatgctgttggacatggacgccaacaacactgaattgcataccaagcgatgggaactcctgtggggagtccagaagtcacagcgctatcactcctgccgtatggcattctttgaccgctgcgacaagctgaattctgttattgggttattgagtggttccgcagtaattgcttctctgggccaatacgcgccacagtggatggcccttgccggagcagtcactgtcaccatcgccaccagtattaacctagttgctggaacggcacagatggcacgtatccatagcgacctacgccgccgcttctctcaactagagtctgacatcgtcaatcatccagacgcaacgcaagaacaaatttctgcctggactgcacagcgtctggagatagaaagcgatgaaccgccgatctttgttgccttggatattttgtgtgaaaaccaggtgacgcgatcttacgcccatctaaaggaccacccatcacgcacactgccctggttcaagcgtgttacggctcagtggttgacgtgggggaatgcgtagcttgcggcgtaaacactcaggcttcactatagacaaatgaatgatgatcataaaataggtagcggaagcactcacaatagtgttcctgaacgtattgccaaactggaagccgttctaccaacgctagctaccaaaaccgatgttgagaaagctagtcatgaagtaaccaaatgggtagttggcactatggtaggcggtgttgggctatttatcgtcatcatgacgtttgtgcttaacaatgcggtacctaaggcttccgctcctacaggcacgcagccatccccaatcatcatccaggttcctgctcaggcattgcagccaccgtcgcaggcggccaagcagccttaatcatcagttgccgttaaacggctcataacctttaaaaacaccaccccgcacgcgcggggttttttaatgcttggagaaacccgataaaataattaggaactcctattgacaatgtgattatgactagctaatttaactccatcgccccacgacacccgcaaccggcggcaggggcaggagataacagatgtcgttagacagcacccaaattttcatactctgcttagctgcgtttattaccgcagtcaacgcatgggttgtattcaaattaggtacagggggcttccaccagaacgtaactctcctagggcacccctacccgccaccacggccaccaagggggccaagggcaccaccgccatcaccacagcccacttcgacgggggagcctgctccggtcaaggcagtctccgacgatgggggttctcctgtcggctgtgcgccctttttgaaagacaaccgctgccgctgtcactgccaagtaactcaggtttaccacctccacacatgcgaacggcgcgcctccggcgacgggaatcatggtcgcgtaagcaaccttcagccgaaccgtgtcccggcgaatcatccacaccgcgttaaaaacgccaagcgtcgcaccaagcaccgccaaagcaagtgttaacccattcgtccagttcatggcgccaagcataaccgcgctcaacacccacacccaaacacgccccacgacacccgcacccagcggcaggggccaggagatatcgaaatgacatcaatcattagtgagcaagcccagcctcaggctaaccaggccttatcagggactcaaaaagcgccgttgttttattgggatggcattaaggatgacgaaggcgcggagttacagcgcgctagctactccttggtagcaccatacgatcctaattcggcaatcaaagtaagcgcccttagtgacccgttgccactgtttagtagtttggtgtgttcttgcttcgtcgttcgaaccgatagggatgacaggtgttgcgattacttcgttgtaagcagaaggcacccacagtacgagcaagtccgtgccgcttacaaagatgccgtttttctgtcatgccacaccgttagcggcgagcacaccgttagcgacgaggtggccgcatgagcaccttgaccgaagaagtacaggctaaccaggccttatcagaaactaaaaaagcgccgctgtttgacttcttttccgtcagggacgctgaaggtgctaagtcgcaatacatcactgagtaccttaaagaaccaggtgtaaattcttcagaaggaacgatacgagtttttgcagctcactacgttaagttcagtcctttggtgcgctcatggtttgtaggtaggccagacggcgatatacagcgtacgtctatggggtacgaatatatacgtgtagaaccaacacatccactgtatccgcagataaaagatgcgtgtgaagaattatacagctttaatgaatccgtcctatcccatttggcacacaaagccgccgctacaccaaaggcaggtgcgtaatggctggcattgggtatagcagttatagcgatccgcgtttacaaccgcataaaaaggattcaggcaattttatccaacaagcgttcaacacgtttaagcggttgcacacgtgcaacatggccgagtgtgcgaagaacatcattgtaagaaggcatcctgagagcctcaatttctggtggggcatctataagaattttccgcatctggctatcaagcttctccaacgtcaatgccgactgctccacctgaagctccacgcatttacgacgttggtgttcatacgcaacagtctgattgctcaaatcaaagacaagatcagccaatccagccaccgcaacaaccacactcagcagcgaaaccaaccaaggcaatccactcacaacattagcaattgcaaccgttccagcaaggacactggaaaaaacaaacagcttgcgcagcctgcaataaaaccggatatgccgttcgcacaagcgaatgtgatacgccaaatcaaactcagcttcatatttagtacgtgcttctggcgctgttgtattcatgagttcctcactgtttttctgacggtggtggctggggcatgggtgctgggggaagctgcgttggtccgcgtaggggaacgcctgaccttttctcaaaatcctgttcatccgcaatctgttcctcagtcatggctggccccttggggtttgatggttgttgggacttccatcataaacgccccaaggggttggcctccaggaccccaacgttcccacagcaaagcagaacgcgctaaacctcacgagcaagcatggattgaacaacagcgcatcgccgatgccatgcaggagggatacgcatgattccttgcaccatcactgcacgcaccaagcagggtgtgtacacgtacaccggcctgttccaaaaaactgttgaggccaagtctgacgcctaccggcgctttggattcccagccgtcatcgccgttacagccattcaccgcacatcgatgcgaaacaacacgcagcccagcccgccacgtgcggcgtgatctgacacaggacaaacccacccatgaaccgctatcgcacaccgaaagaacaacacacagcacgttgcaatgacgacacacccccttggttagcccactgcattttgcgcgatacccgagcaacgcccaacgcactacgcatcgccaattaccgcgtgcgtcgcgcgcactacgacgccgccaaaacgctttcatccctactgatcaaacactaaccccgaacgtttttcgggaaggagtttttatatgtcgcctcccatgccgacagaaatgttcatgcgttcgatgagtgatagcgaacttgtgaatgacctaaccacccggcaagccgtggagcgttttacgcctgtagaaagcgagttgttatcgcgtcttaaaggcttgctagaagactacgaagaggtgcgtgacgcactggagcaagacggcgatgcgcagtggtgacaacggacaacgcactagcaccagataacccacacacgagagaaaaaacccatgttccctataaccgtcacgattaccgaccaggcccaattaaacgctgttttggcggtgcttcatccgcccagcaggtgcagccccgcgcaacctgtgcttgacgatacaccgcgcagcgatagcgcccctgaaaaaccaacggcggcaacgcctcccgctgcgggtaagacgcagcgcgctgccaaaccggctgctgctaagaaggcaaccgaggttatgagcacacctggatatgctgaggtggcgaatgcgttaacggccctgtctaaggagattggcgaaaagtacgcctacgacgttttggaatcattcggcgtcaaagtgttgtccaagataccggaggagttatttccgaaagtgctggagtacatcaacggattttacatcgcccacgaacgcggtttgcccttagacgctgtgccctcagacggtgagccatgagccagcacgccatgctatccccaagcagtgcgcatcgctggctgcactgtccggcaagcgttccgttaacgcgcacctgccaagacgacgctagcccatttgccgatgaaggcaccgtggcccatacggtggctgccaacgcattacgcaccgggtccgatgccagcgcgtacgtaggagaacgccatgagatcaacggtcgcacttgggaagtgaccgcagagatggccgcgtccgtgcaggagtatgtggactacgtgcgcgccattgcgggggtacgcctggtcgagcagcccttacacattgcctccatcacgggggagcaaggcgctaaaggcaccgctgatgtggtgattttggcgggggatgcgttgaccatcgttgatctcaaatacggcaaaggcgtcaaagtcttcgccgaaggtaatgagcagttgcagctgtatgcgctggcagcgctgagtgaatttggatgggtggaagacttccagcaggtgcggctagtgatcgtgcaaccacggctcggacatagtgatgagtgggtgcgcaccctccccgagatggaggattttaaacagcgggtcaagcgcagtgctacgcggtgtatggaagcgattgggcactacaccaacgtaggcgaattatcttcggagtatttcggccccgcagaaacgccctgccggttttgcaaggccaaagcgagctgccctgcgttggccacgcacgtactgaccacggtcgcggatgattttgttgatctcacccagcccgtggccccgcagctcagccacgcggccctgcgcacgtttgacaacaccacgttggcctccctgtttggtgcaacagcgttaatcgaatcctggtgtaaatctattcgcgacagggcagcagcggaattgctttcaggccagcccgtacctggatacaagctggtccaaggccgacaggggccgcgccgttgggtagatgagacagccgccgaggacgcgctcatccagatgcgcattggagtcgctcacctgcatgacgtgtccctcatcagccccacgagcgccgagaaactccaccaggccggaatcatcggggagagccaatggacccagctccagccgctcattcatagggcgacaggggcacccgttgttgtcccgacgtcggatcaacgccccccgctcgcccttcaggacgcgacggatttcgaggacttgagcgacatgcccatccccccacccaaagacaccgccccctcacctcaatctcaggagacaccgtaatgaaactcaccctaaaaaacgtgcgcttagccttccccgtgttgtttgaacctaagaaagtgaatggtgaaggcgaagccgcgttctccgcctgcttcctcatcgaccctgccgatccgcaagtcaaagcccttaaccaggcgattgacaagatggccaatgacaaatggggcgttaaggcggcggcccagcttaaacagatgcgtatgggcgacagagtcgcgttgcatgatggcgacctgaaagccagttatgacgggtttgcagggcacctatacgtctctgcgcgtaacaaggcacggccactggtgatcgaccgtgaccggaccccgctcgccgcgcaggacggcaggccgtatgccggatgttacgtcaacgccaacatagaactctgggcacaggacaacaactacggcaagcggattaacgcctctctgggtggtgtgcagttcgtgggtgatggtgaggcgttcgctggaggcggtgtggccagcgtggaggacttcgaggacctgagcgccattgctgagctggccgatgttgaaggcgccatgccgtgggggtgaaccccgatgtgggaggacgtttcgccctcccacaccccagctccccttatccctgtaaggacaacatcatgaatgcaccctctgagttcactctccagttcgaatcccacgccgtgcgtgtccaggtcgatgaggccggtacaccgtggtttaacgccaatgacatttgcacggcagtggagttgttaaatccgtgcgccgcacttgctcagcatgtgggtgccaggaatgtatcgaaacgcaaaatcatcgacaccatcgggcggactcaacgcgccaactatctcaatgagccaggaatgctcaccctgctcatcggcagcaccaaagaggcggctaaacgccttagacggtggctcatcagtgaagcactgcccgcagccgcagttcaaaaagcgggccaacacagtgtcccccaacatcacgcaccttccgtctccactcccttccaacccacagaggaccacacaatgaacgccatcactccattccaatttgaatcgcacgccgtgcgtaccgtggtcgatgatcacggtgaagtgtggtttgtcggcaaagacgttgccgatgtactcggctacaccaaccataacaaagctttgggcgaccattgcagaggggtaacgaagtgttacccaatcctagatagccttggtcgctcgcgagaaactaggatcatctccgagcctgacatgctccgcttgattgtgagcagcaaactccctgccgcagagcggttcgagcgttgggtgtttgaggaattactgcccaccctgcgcaagacaggcaaccgccccgcgcttgaccactccactcattcggccaacgcaatcactccattccaatttgaatcaaaagatgtgcgtattcagctcgacgaggccagtgcgccctggttcaacgccaatgatgtgtgtgccgttctggagtttggcaatccacatcaagccattgaatcccacgtagatgcagatgacctccagaagttggaggtaattgacgcgctggggcgaactcaacgcgctaaccacatcaacgaatccggtttatatgccctgatcatgggcagcacaaaacctgcggccaagcgctttaagcgttgggtgacgagtgaagtcctgcccaccctgcgcaaaacaggcacgtactccacacctggggcgctgcccaccttgcctgggccgacacaggatcgcattgccgcactcctgttaatcggccaatacatttccacggtgccgggcgtgaaaccaggaattgctgccgccgcgaccttggcctgtatcaaaagcaatacgaatttaacaacggaagagatacgccgggtattgccagcgttacaagaaccgctttgcatgctcaatgccacgcaactaggcaagcagctgcattgctcggctaaggaggcgaaccagttattagcgtcggcagggttgcagttccgtaatgaacgcgacgactgggaattaaccgaagccggtcgtgtgtggggtgaagccattccgtactcacgcaacgggcacagcagctaccagattctctggaatccgacggtggttgactcgctgaaggtcgccgcctgagatggccaccgcgcagccacccgccccgatcctatggggggacctagagacgtactcccccgtcccgattgcgcatggcgtgcatgcgtatgccgagcacgccgagctgttgctgtttgcttacgccttgggtgaggggccggtgcaggtgtgggactgcacggccacggccacgctgcctgacgacctgtccgccgcgctgcatgacccaggcgtattactgtacttccacaactctcattttgatcggaccgtactacgccattgcggcatcgacatccccttggagcgctggcgcgattcaatggcccaggccttggcccattcactgcctggggcgctgggcacgttatgcgagctgctgcgcgtgcctgtggagcacgccaaggacaaagacggcaaacggctcgttgcactgttttgcaaaccgcgccccgcccattgcacgctgcgccgcgccacacgtgacacccatccgacggactgggcacagtttgtggagtacgcacaacgcgatgtggccgcgatgcgagacgtggtgaagcggttgccgtcccacaactacgcgggggcggagctggcgctgtggttcctggaccaaaccatcaatgatcgcggggtcctcatcgatacggacttggtgcaggctgcgattcgcgctgtggaacgcgccaagcaaacgttagcccagcgtaccgaggcgttgaccggcggcgcggtgcaggccgcgacgcagcgcgatgcactgttgcagcacctgaacaccgcgcacggcgtggcgttgccggacatgcagcaacacacggtcgcgcggtgcgttgacgatccggcactcccagagacggtgcgcgaactgctgtctattcgccgacaagccagcagcaccagcaccgctaagtaccaggcgctactgcactgcaccagccctgacggtcgcctgcgcggcacgctgcaatttaacggggccagccgcactgggcgctgggcggggcggctgttccagccacacaacctgccgcgtcccacgctcagccaagaagtgattgcggtcggcattgatgccatgaaagccgattgtgtggatttagtctttgacgatgttatggcgctgaccagcagcgcgctgcgcagttgtctgattgcgccaacacataaaaagctggtcgtggccgatttgtccaacattgagggccgggtgttggcgtggctggccggtgaaacccccaagctgcacgcgtttcgtgagtttgatacgtgccaaggggtggacgggtgttggcacacgggagcggccatcactcacggcgcgctgcgcgccgcgccgctcgccttgcaacgcaatgcggatcacgcgcctattcgtcgaggtgacgacatttataagcgcgcctacgcccattcgttcgggatagcgccccaggccgtgagcaaggagcaacgccaaatcggcaaagtgcaggaattggcgttggggtatggcggcggtgtcggggcctttgccgcctttgcggcgctgtatcacatcgatttggaggcgatggccgcacaggccgtcttcccgccgctgctacttcaggaggcaacggaactacttgaatggaccaaggcgaaccaccggcccaccttcgacctctccgatcgcgcatggctggcgtgcgatgtgttcaaacgcgcatggcgcaatgcgcatccggccattgcggcgttttggcaggcgttgcagttcgcggtgacggatgcgatccatcaccccgaaacgacgcacacctgctgcgggatcacagtgcagtaccgccgggcatggctgcgtctgcgtctgccgtcggggcgggtgctttactacgccgctcccagagtcgatgagcacggcgcgctgtcctacatgggcacgcatccgatcacgcgaaaatggacgcgcctcactacctacggcggcaagctggtcgagaacatcactcaggcggtgagccgcgacgtgttggccgcctgcatgcctgcgattgaagccgccggatacagcatcgtgctgaccgtgcatgacgaaattattaccgaagccgatgaccacccctgcttcaacgccgcgcacttggccgcactcatggcgacaccgcccccctgggcagaagggttgcccttagcggcggaaggcttcgacacctaccggtataggaagcaatgatgaacattccccgtgagagaacgatcgaacgctatttagtcgcacaggtcagggccaaaggcggtgaaatccgcaaggtgaaatggggtggccgccacggtgcgccggatcgcatcgccatgctgcctaacgggcgcaccctgtgggtggaactcaaagccccaggtaagcagtgtacaccgcatcaagtccgtgagcatgcgcgtatgcgccgcatggggcagcacgtggtcgtggtcgattccttgaaaggcgtggatgaggtgctggcgtgactcagaaaaacgctttgatgatcagtgcagcaacgcccgccacgagcacgcctagcatccacttgagcaggagcatttcgccttttatctccgcaaagcgcgtatccacctgcgcaaagcgctggtccatggtcttttccacctgcgcaaagcgctggtccatggtcttttccacctgcgcaaagcgctggtcaacctgcgcaaaaccttccttcatatcggcttcaagacgcgctaatgccttgccatttttagattcggattcagcaaggccttgtaaatttatttccaacacttccgccaaggcttcggcttccgcctccgcatgggccgcaggaacgcctgccgttttcaaccggttcgcaaatttaagtgtatcgaatgctacggatgtcacacaggctccttacctaggtgcagctgatggcgagtatagcagcgcgcctcccgcccatcctgaaatgctgcacggagcttcggcatgaacctacgcccctaccaacacaccatggttgatttcatcctgacacacccacgctgcaatctgtttgtgccaatgggtttggggaagacggtagccacgctgacagcgttagatgtgcttctggtggtggaagacgttgcacctatgttggtcattgctccgctgcgcgttgcggccacgacatggccggatgaagtggccaagttccctcatttgcgccatctgcgggtggccgtggtcgtgggcagtgcggcggcacgtcgccgcgcgttggagcaggacgcggatatctattgcattaattacgacaatctaaaatggctggcggagttttatcaggaccgttggccgttccgtaccgtggtggccgatgagtgctccaagctgaaagggttccggctgcggcaaggcacacggcgcgcccgcgcactggccaagtatgtgcataccaaggtggagcgctacattgggttgaccggcacgcccgcgccgaatgggctacaggacctgtgggcgctgatgtggatggtggatcggggggcacggctggggacgcattttaaagcgtttatcgatcgctggttccgtgcggtgcagatcggcagtgatccgcatgcggtgcgccttgtgcccgcgcccaatgcatcgaaagagatgcaagacaaaatacgcgacctgtgtttatcccttgatccacaggcgtactttgatttacgccagccgattgtcaatacgattcgcgttgtgttgccagaacgcgccagacgtttgtacaaaacgatggagcaagagatgctcatcgccttggaatgcggtgccgaagtagaagcctttaacgcggccagcaagacaattaaatgcctgcaactggccaatggtgcgctgtacaccgatgacacacgccaggcctgggaagtcgtgcacgacgcaaaactagaggcgctgcacgagattatcgaagaggccgccggtatgccggtgttggtggcgtatcactttaaaagtgatgtcgcacggttgcagcgcgcttttcctaaagggcgtgtcttggaccaacaccccgacacgctccgcgattggaacgcggggaacattcccgtgctattcgtccatccagccagtgccggtcacggcttaaatctgcaagacggcgggaacattttggcgttcttcggccactggtgggacctggagcagtaccaacaaatcatcgaacgtattggccccacacgccaggcgcaagccggacatgatcgccccgtcttcattcaccacatcgtggcggcgggcacggtggatgagctagtgatggcccgccgtgaatccaaacgcgaagtacaggacttactgctagaggcagtgaaacgcagagacacatgtaagccactcacatcacaaggagcaataacgttatgaacaacccatcaaatgaaaagcatcacaccaccccgccactcgagttatccgatgaatgtgtgagcaatttttcagaacttattaaagcgttagctgcttataaggagattaatgcaaagaagaagggggaggacaccgagcagggatcagacaatggttaatgtgcacgcaagacaactacgagacatgcccccagccgctgggttatgtctttccagaagtgaggtggccgagttatgcggtaccccgcaacgcgctcgccaagccgcctttcttaggaagaacggcattcggcactatctggatgcgcatgattggccggtcgtgctgcgtgctgcgattgacgcgatgccgccttctccgatggttccgcctgtgtggaagtctaataagatcgcctgatgggacgtaagccaagcaaaacaggcgcgattccgaggtttcgcgtgcgccctcagaagtccggcgtggtgtattactactacgatcatggcggcacgccacgcaaagagacgccactgggacgcgactacggggtagccatcaagcggtgggctgagctggaacatgcccagatcactcctgcgattgcggtcacgttccgccatgtggccgagcgttaccgcgctgaggtgatcccaacaaaggcgtataacacccagcgcgtggagcatcgttgtttggctgcactcctgaagttttttgatgaccccccggcgccgtttgaggccattaaaccagtgaatgtccgccagtatttggactggcgcacctcaaaggtgagcgctaatcgcgaagtagcattattttcgcatctttggaattgggcgcggagtaagggaatcactgatcttcccaatccttgtgcgggcatccgtcgtaataaggagcgggggcgcgacgtgtatatagacgatacgacgtatcgtgctgtttaccatgcagcggatcaaacgctcagggatgcgatggacctcgcctacctgacggggcagcgtgtgggtgacgtagcttctatggatgagcgccagattattgatggcgttttgctgattcgccaagctaagacgggcgctaaggtcgctatttcgatcactggcgaattggcagttttaataaagcgtatttttgatcacaagcgggggttaaagctgcgtagcacacgtttgattgtggatgaaaaaggctttgggctaggttgcatggcgctgcgctacaggttcaagaaggcgcgtgctgccgcagggatcgccaagcaggtattccaattccgtgatctacgcgccaaagcggcgaccgacaaggcagatttggcgggggacatccgccaagcgcaagcacagttgggccatacctcggtggtgatgacagagcactatgtacgcaagcgcaggggcgcgaaggtcacgcctactcggtaaattgcggagcgctgctaatattgcggagcgcgcttaacttcttaagttattgattatgttttactttatgaatgaaatcgatcttcttctaatacaccaatactgtagtgctacatagagatagatagcgtgttctcgttagtcaagtcggaacccttgaggaaaggcagcagtgtaagcagccaagtgagacctatggagagatggacagtcagaaaacgaggtgatgctatacgcgaacgcttattaacattttcttcactcagcggcattagatgaccaccatactagggttgttccagaggtaatctatatcttctatgcgtgtccctgtcttcctgcaatccaaccatttccgatacttgtttgaaccacgcaaaccccgccatcccatagcgcgacttatggcaagcaccgcaggtcttaccattttgatagctctggtgttcttcagtgtgttcgttggcgcagcaatgattcttggaggaatcgcctggaaactattagtaggtcagcctcagcgtactcatgctgaagttggcacacagactatcgaagggaagtaccgcatcattaacaagcccgatgccccactgtgaagttaacagtccatttttacccaattctctctcggaaccagctgggtacggtacaacactccttagtttcatgattgattttgacttcagaccgctgtttagtcaaagttcaacgtgaataggcatcgcgatatcgcatactcgcttcaccacaagatctaaccaacatagctatgcgccaatcgcgccacacacgggatagtagtcataacatattgcatttgatgaacaggcgattactgctcactaacattccacaccatagcaaatgatcttttatcagctgtaacgtcagctatcgggacgatgcacagggttatacgccctccacctagtcactcaaaattaacctagcgcattgataccagatcggtgcatgttgcaatccccttttgaatgcgtagtacaaacaggtgacggcagcggcatacgtccttgcagatggttcttttaaggtacgcctgtggcagcgggattcaacttaaaacaagtgtctgtcgagcaacagtgtctgcatttcaatctttacgacctatgtttgctggagtgagttgcaggctcgatctcagcaaacccaatttcgctattagttcatgcatgtacagaacctgtgccagtaaacgaagcctttgggcagagcacactatttgcaattgtgctcagcgagataacgtatgacccggagcacttgcagattattcgaactgacattatcgcgttacttaggtaaatagcgttcaacctgcgcgaattgggctacagcgatccgcataagctcaccgcgccgcagggacatttctcagaaccactcctgacgatgattctcatggatccgttccagctctccatattcttgcaaagacgcaacgctggctaaggtggtaactcctgggcaccaattgcaatggattgacatcagaacagactttgaaaatcgcttacttacctgtgaaccgggacgctacataatgcgacgaaaatctgtcgaatcatgtataagattcttaaaaatcaaagatataaatgaaatttcccataccgattacccgttgcatctttccatgctccaccgctaggtaaagcgttttgcattcataacatccaagatacattcggttgaatactgatgaagctggccattctctcccgcaacagcaagctttattccactcgacgtttagtcgaagtcgcacgtatgcgcggccatactgttcgtattcttgacccgttacgctgctacatgcggatcgtggttggagacttcagcatgcactataaaggcaagcccatcgacggctatcacgcggtgattccacgcattggtgtatcggtcacgtactacgccacagcggtgctacgtcaattcgaactgatgggcacctacagtcccaatccctcggacgcaattctgcgctcacgagataagctacgcgcacatcaactgttagccgcccaggggatcgacatgccaatgactgtgttcggcgacaatcccgacgatacccaagacctactctgaatgctcggtccgcccccccatgtggtcaagctgaatgagggtgcgcagggcaagggagtgatcctatcggaaaaaacagtgcctcacgcggtttggtagaggcactacgtgggctctatgccaattttctggtgcaggaatttatcagcgaagctgaccgtgcgaacctgcgctgcttcgtcgtcggcaaccaagtcgtagcaacgatgcgtcgccaagctgcggatggtgactttcgttacaacctgcacctaggcgggagtgcaactgccgccaccgcaagcgaggaagaacaagaggtggcagtacgttcagcacacgcacttggactgaccgtggccggggtagatctcatccgttcaagaggtggaccgctggtccttgaggtcaatcccaccccggggggttggaaggcatcgaagcgacctccggcaccaacgtcgccataacgattgtgcgccatgtcgaatagatgctggctactatctgagcagcaatatttaccaaccctgatggattatttaggtcgtagctacagcttatcaatcacagcacttgcctcactgatcatggcattaaaatttattttttgttaaagcacttttgcttaggtttttttgttaggtagcccttgatgggaaggtataaagcgcactacagtcctaatcagtatgatgaagcaccaatctccacaccgcagtagaagattacacagagtgatctgccatcattaccaatcaggtagcacttgccttggcccctaccttcgattggctacatcgctgtggaaggccacaagtgggagacaagttagacagagcttcctaaaaaaccatccattaagccaaagccgttaccgccatactgcggcacatactgagtcggatgtaagtaatatctggactttaaacctatttgaagacaatgccggttatacagccgatcccaaggacaaggacacaggaactgatgcacagcattttggtctacaagtagcccatgacaatgcaattacttatcaccagttccaatgccccctctccttatgcaacataacgtggttacatccactttgcttcccaagcaagagggagaccatactccaataatcagggtgcagcggtgccctcctcctcctcccaacaattgaggctcaagtgcgcattttggtcatcgaagacaacagcgatatcgccgccaatctgggcgattaccttgaagaacgcggccacgccgtggattttgccgccgatggcgtgaccggattgcatttggccgtagtccacgaattcgacgccatcgtacttgacctgaatctgcctggcatggatggcattgaagtctgccgcaagttgcgcaacgaagcacgcaaacagaccccagtactgatgttgaccgcacgtgactcgctggataacaaactgacgggcttcgactcgggtgctgacgactacttgattaaaccattcgctttgcaggaagttgaagttcgcttgaacgcactatcgcgtcgtggcaaaggcctgcaaacccgggtattggaaacaggcgatctggaatataacctggacacactggaagtacgccgccgcggcaaactgctacaactcaacccaaccggattgaagatactgcaagcactgatggaagccacgccagccgtagtgacccgccaagatctagaaactcgtgtgtggggagaggagctaccggattcggattcgctacgtgtgcatatccacggattacgcgccgtcgttgataagcctttcgacgtaccattgatacagactcgtcatgggatcggataccgcatcgccacacccgatgcatgaaaccggggcacagtcccgttcgaaagggcgacacgcgcgctaccggcgccggttaagaagccgcatcattttatccttcttatttcttggctttgcactgacttcgctgtttgcgttcgccacaaattgggcgcgcgcacgggtggaaaaccagctcgtcgaagaattgatgaatcgcaacatagacgagtatgccaagcgctactatatggatccatcgcatagcccggatctgccagtacaacagataaaagcattctactatccacgggataaatttgaccgcgtcaggttagaacgccctgattgggcagcactcccgaatggcaatcacaatgtgattggcttagacaatgctggaaaactatttgcgtattacaaactcgcggtacgcaaagccgatgatgcttggtttttcttggcttacgacatgaccgaggctatacgtggcgagcgacagctcaaacgtgccctatacatttctgtgctagtattcagtgggctgtccctacttattggatggtggtcggcctcaaaagtgatgaagccagtttcagacttagctaagctactacgtacttatcgtggtcaaactacaaatccaaaacctctcgccccccactttccagatgatgaagtcggcgagcttgcgcgtgcattggacgattattcaagcagactcactgaagtagtacaaagagatcgtgaattcaacgcagatgtgagtcacgaattgcgtacaccactggctgtcatccggggggcaaccgaactgttactcaccaaacccgaaatggacccaaagatccaacaacggatacggcgtattcaacgcgccgaacagcaatgcagcgacctgattggtgcattgttactgctttcgcgcaacgaacgcggccatggaagcagcaatgtcgccaaagttgctgaacaattactggattcgcatcgtgcccaacttggcggcaaacgaatcgaacttatcttggaggataaacacgatctaacggtgaatgcaccagaatctgcactgtccgtcgcattggggaacctgattggcaacgcagtcaagtacacccttgaaggacgagttaccgtgcgggtacttgaaaaagcggtcgaaatacaagatacgggtcctggcctcagcgaacaggacgctgccaaactattccaacgtggataccgcggtacccatgcaggacattcccaaggtgggggcattggcctatcaatcgtgagccgattatgcgatttatacggctggaaagtcagtgtgcaaccaggagactcctacggagtgattgctacattgcgtttctttaaataacgcaatatcaaaatcaaccgctttaataacccacaattaaaagcaatgagagtatccaagaaacattaatcagcggatcgaagcaactcatacatccatacaacactctattttccacatcgacccggcgacctgttcatctctaatcgtgggcccatcggttcagtactcttgcggataacaaccgcaaataacatccaccaccgtacactatttaagtgtcacaatgatgaattgatgtctatcggtaatgccaacaattgatactaatcaacatcagaaaaaacagaagcaagagcgcgatagcgcgcgtccaaattgcatacctgcccgcccaaatgcacgggatctccatcgttaaacacaatatcgtcggctatagctaagcgctctttgcggccaatctgggccgcgatcatcaaggaagcctgctcggcgtcaattgaatcacgctgcatcagtcgtgcgtgttgtacttccggtatggcatccacgacaagaatgcgctgcaaccaagggtatccgatgcgaccaccagcctcggccaaaagtggaatgacgactagcacatatggacctgccgccgccgccgccgcctgcttcaacccagatcggatcaccggatggacaatagcctccaacgcctttcgttcggccacatcggcaaatacacgttgccgcaaaaaacgacgatcaaggcaaccatcagcccgcaaaatcttgctaccaaaccgagcaacgatgcaattgagaactggaccaggctcaaccacttggcgggcaattatatctgcatcaacaaccgtcgtgtttaacgcctcgaacagctgcgccagcaagctcttaccgcaagcgatccctccagtgagaccaaccgcatagacactcatcaactccaacctcacccgatacttaatagctccagataagcatggatgatctgatcgccgaaaaagaacacgatccatccaccaactgccagataaggtccaaacggaatcatcgttgtacggttatgaccacgcacaacaagccaaacggagcccaataccactccagccagtgatgaaatcaaaatgatcgggagaatacccttcaacccacaccatgccccaagcgcggccagcattttgaagtcaccatggcccatcccttccttgttaaagatcagtttgaacaacgccgccacaatccacagagataaataaccaactacagcccccaataacgcaggtttggctgccataaacaagttatccgtcgatccaatcaaacccagccacatgagcattaaagttaactggtcaggtaagagccgagtacgcaaatcaatcccagccaacgcaaccaggaaacaactgaacacaattgccccaaaaccatgccaaccgaatccaaaacgccaaacactggccagcaccagcaggcaagtcagcaattcgaccaacggatactgcaacgagattgacttgccgctgtaacgcgaacgtccacgtagcaacaaccagctaagcaccggaatgttttcccaccacttcaaccgatcaccagtcactggatcgtgggaaggctcgaccacaattcccggtggtggcggatcataaatgtccggcatctccaggatttcgcgcgcatcgcgcttccattgccattccaaacggcgcggcaaacgcaggatcaccacattgagaaaactaccaagcaacaaccccaaaccggacgcaaggggataaccgagaccggggtgctggtcaagaaatgccataacgttttatccaacgacagaagcaagcttaaagatcggcaaatacatagcaatgaccatgccgccgacgataacaccaataaagaccatgatcagcggttccagcaaactgctgagtccatcgaccgcgttactgacttcctgttcatagtactcagcgactttaaacagcatcgcgtccagagcaccggcttcctcaccaatggaagccatctgcaccaccatatgagggaagataccaacttgcctcattgacatatttatagaatagccaactgagacatcatcacgcatgcggaacacagcatccgaatagaccttattgccggttgccccagcaacgatacccaatgcctctaccagtggcacccctgcacggaaagtaacagctgttgttcgcgagaaccgagcaagcgcgctattgtgcataattgccccgatcaccgggaacttcaacaccaacctatccagcagatgttgcatggattcagagcgcttgtaagtaaacaaaccaccaccgataacaacaatcagcagagccaacatggcccaccaccaccgctgcatgaagttggaaaaattgacaatcatctgagtgaatgcaggcaattccgctccgaatcctttgaacacatcctcgaactgcggcaccacgtatatcaacaaaatcgaactaacaatgagagcaaccgcgacaatagcaacaggataaaacaaggccttgcgaatttttcccttcagagcctcaatgttctccttataactagcaatcgtatcaagcaccgtctccagcacgcccgcgcgctcgccagccctgaccagattgcgataaagctcatcgaaatataccgggtgcttgctgattgattcatacagcgaggaaccgccttcaatatcatttttaatttgattgaccatcgtacgcatacgcggattcttctgaccgttggccaaaatatccaacgccccgacaatggggacaccggctttcatcatcgtcgccatctggcgactaaaaaaggcaatgtccttcggagtgatccgcttccctgcctgaccaaacagcggcttaggcctcggcttaaccacaagaggcgtgatgccttgacgacgtagctcagcacgcaacaagttcgccgtgcgtgctgtctgttcccccttgattttgacaccgcgcttatccgtcccttcccaaagaaacgaagtcaacggcgggctggtattcccagcacgcgaagcatttaccgcagtacgtgttgcaaatatcaatgctgttctcccatccaccgtccccaagcggaccgatgacgcatggtaactggttcctgaaaccctagcagcaaaatctaaaaagctcgtgccccacacccataagcgctcttcattcaacacccccataaagtgacattcaatggcatatattgaccatttacggcttctgtaataatggatcgcaattattaaataaaacccttccaaagtttattcattcgggcatcataatttctctatgaagcttctttatttctgaattctgaatatagctcgcatctccagtttaactggcagcgcagcaataaacccccacccatgaattctcttcatccatacgtttaatgagtgaccaaattttttattgaaggtatacacatgaaaaagcaacaaggttttaacttaatcgaactaatgatcgtcattgcaatcattgctgtcctagcagccatcgcgctgcctatgtaccaaaattatgtcgccagatcccaactcaccgcggcactggccgacatcacgccgggcaaagtgcaagccgagtctctgattgctgatgggaagagtacatccaacgcgagtgatatcggtctgcgtaccgacaccactcgttgtgggattaccgttaaagtcgatgccgctggcactgccaacatcacatgcaaagttaagggcaactctcaagtcaatgataaaaccatcgcttgggatcgtacctccgataactctgcaggcaccaatggtgtcaataatggaggtgtgtggacctgctcctccaccgtcacctccgatgcactgagaccttccggctgcattgcctctaaataatgaatacacacagcaatacgatcaatgctgagtgaccgcgttcgcctaacgtgatagatccggtgagaagcccgccttgatggcgggcgctttgataatattattcaatacatagcttttatactcagctgacatttcaaaacctcattaattatatttttacagcttaacattattatcaaatatacaagaatgagccgttacaactattattaaaaactcgataaaccatcgcttctaatataaaaacgcaatgcatttcactttacttcatccaaaaatttaatcattaaaaaatatttacaataatccctctgactttcaacaatactcatcctggcgcttcccgaaaaaaccgtaatctggcgaataagtgcatccggaagcatccaagcttttggggatgactctatcgacaccgcaaacaacaccacatagcgcaccatgtgaatcttaatcagcacccaggaaccacagactgcataaagacctcaggaatcatccgtaacccgccggaacacttaatcttgctgagggcggcctcttgaaattcagtcttcggcaccttctatcagcatgataaaacaccggccctcccgtccaggatgatcaggagcgacagtgtgcaaccacatgcacacgttgttctgcccggaaaccaagatatcgctggcaccacatgcgaccggcactcaaaagtgagcggaccgcagcagcgatcatgactaccaacatcgcgagcctgaaccaaagcttttattcactacatcattgacaacaacaggacgttgccaaaatccacagcaccgcagtggatccatgttgcgtgctcacgcattgagacttcgcctcaggtcactccatctccttgacctgtcgcaaagtaccttccatcgtttccctgcgcggacaacaccccgaccaggcaaacgaaccaatggaacaaacgcaaacagttgtcagcatctctaacccatcccctggattggtgataggccctgccaaggaccactgttgacactgccatcatcaagctgcgttctcaccccatcccgcaaccatgctttgtattgcgcctttcaatattgcgatgcataacgcataacggcaggtcctgacccaatacggcgtttttaacacgcctcttctccaaaagagaaagagtgataagtatcaattctattttttgataaaaatcacattattggcacaccttctgcttaagtcatcttgccagtgctggacaacgcattcagcaacgctggatttcttaccaacgctatttaaggattcatcatgaaaaagcaacaaggtttcactttgatcgagctgatgatcgtcattgcgatcattgccatcctcgcagcgatcgctctgcccatgtaccaaaattatgtcgccaggtctcaaatcgcagcagcgctggccgagatcacaccgggcaaggtacaagccgaaatccgtattgctgatggacaggctgcaaccactcctaacgctatcggactacgcgccccgacccctcgttgcggcaccattgtggtcgacatcgcaccttctgccgctagcgcaatcacatgtacgatgattggtaatgctcaggtcaacaatcaaactatcaccttgactcgcatcgctgataacaacgcaggccaaggtggcgtcaatactggggggaactggacctgtaccacaaccgcgcctgcggcgttaactccagcaggctgtactggagttagttaacaccagcaacaacacgattcacgggtaaatgcccgcattcacctaagggaatcggtgtcaagtaagaagcccgccatgatggcgggcttcatcgtcaatacgttaaaaacgctgccaatctcgcgcggcggcctttgaaaggcagaccgatctacccaaacagtccctcagcaccaaaccacgtgttgaacacacactctctcttgaaaccattggctgtaagagacacggccacccatgcagcgtttccatctgcatttctgcacatctgggctggccatcgctaccgcaacatccctcactcaagcaacaagatgatgatttcaaagcaatctctgatggatcaccttgaaaccatgctctgtccagcttcggtttccctaaggttaaagaataaaaaacccggtggactctcccccatcgaacatggttgagcatcattgcactggcagtgatcgggtttcgcactgaccaaacctaatctggaagatatccaggcggaagaacccttgaccgggatgcttctgtaagaacacccgcaggtcgcgctgaccgacacaacgcattcgggtttctacgccattcatccgaatttgaaggttcaagcacacgttaacaacacggatgccagtaggatcatcttcacaatagttagcaaaccatttcatccatcctctaaaattgacgctcaatcgcaccgccaaagaaaattggacatacgacacaagcgccttcaattgacgtacccctcccgataactgctcattgggaaagccaacgggcaccatactttaaagcagggtaaccagagaatttttcatgaacacacctcattcagccaatcttgtcggcatcaccggcattgcccgtcgcctagtccaggatggcagcatcgaggaagccaccgcacgcactgctcaaaatcaagcaatggccgcaaaagtgcctttaccacagtggttgatcgataaaaaactagtaagtacagcaaagttggccgccgccaatgcacttgagttcgggatgccgctgctggatgtctccgcattcgaccacaatcacaatgcaatgagcttggtcgacgaagaattactgcaaaagcatcgggtgttgccattatttaaacgcggtaatcgactgttcgtcgggatcagcaatccaacccaaacacaggccctggacgacatcaaattccacaccaatctggtcgtggaaccgattctggtcgacgaagaccagatacggcgcacacttgagcaatggcaatctaggagcggcgcgctcagctcggcattggaggaagaggataacggcattgaagggctggatatcggcggcggagacgacgacggggccagtggcgataccgggattgatgccaagagcgatgacacacctgtcgtcaaattcgtcaacaaagtgctgattgatgccatccgacgcggcgcatcagacatccactttgaaccatacgaagaagattaccgcgtccgtttccggattgatggtctgctgaagggtgtggcaaaagcaccgaacaagttgaatcagcgtatcgccgcacgcttgaaagtcatgtcgcaactggatatcgcggaaaaacgcgtccctcaagacggacgtatcaagcttaatgtgtcgaaaaccaagcaagtcgatttccgcgtcagcaccttgccaacgctgttcggcgagaaagtggtgctgcgtatcttggatggcagcgcggcaaagctgggtatcgacaaactcggttacgaagctgaccaacaaacgctttttatggaagcaatccacaaaccctatggaatggtattggtcactggtccgaccggttcgggcaagacagtgtcactgtacactgcactaggcatcctcaatgacgaaacacgcaatatctccacagccgaagatcctgtagaaatccggctgccgggcgtcaatcaagtacaacaaaacaacaaacgcggtatgacgtttgccgcagcattgcgttcgtttctgcgccaagacccggatgtcatcatggtcggcgaaatccgagacctggaaaccgctgaaatcgccatcaaagccgcacagaccggccacatggtgctctccacactacataccaacgatgcaccgcaaaccatcgcacgcctcatgaacatggggattgcaccatacaacatcacttcatccgtgaccttagtgattgcacagcgattggcacggagattgtgcaataagtgcaagcgcccggttcaattgccgacaaacgcattactggccgaaggattcactcaagaacaaattgatgcggggctggaattatacgagcctgtcggttgcgacgaatgcaccgaaggctacaaaggccgcacaggtatttatcaagtgatgccaattaccgaagggatttcctcgatcattttagccggcggtaatgccttacaaatcgccgaagaggcgcagcgcattggcatcaacgacctacgccaatcggcgctactcaaagtcgctcagggcatcaccgggctggctgaaattaatcgagtcaccaaagattaggcatcaacaacacctgttaatgactgaatcaaagcacgtcatgacacgatgctgagacgaagcaaggcaggcgatgttgcctgcttcctctcattactccatgcccagcttctttagtttgtaacgcaaggcacggaaagtgatgccaagttttgcggctgtctttgttttattccagcgattctcttccaacgccttttgaatggcagcacgttccagctgctccatatacgacggcaaggcagccggcgtattctcaccctccaccgatgccgatgcgtccacaggcacaatcgggagaactgtgggcactaacgggagcggcaatccctgtccatgcaaactgccctggggcagatgcagatccgcgacaccgatatgatcatcttcagtcagtgctagagcacgctccagaatgttctccagttcacgcacattacccgggaacgaataatgatctaacgcctccaaggcggagggtgaaagcaacgggaccgcccgcccatgcgtgtgcgccaagcgagctacaatggctgcagcaagatgcggcaaatcgccagcacgctcacgtagcggtggaacacgtatctcgatcacattgatgcggtagtacaaatcgtgacggaagcggccattggcaatcaggtcactcagatcttggtgagtcgccgataaaatacgcacatctactggtacctcaacggttgcaccgattggccgtatcgatttctcctgaatcgcacgcagcaatttaacttgcatgtgcaagggtaattcggcaacttcatccaggaataaagtaccgccgccagcactttggaataagcctggtttatcagtatgcgcaccggtgaaactccctttcttgtgaccgaaaaattcgctttccataagatccacagggatcgcaccacagttaaccggcacgaacgccccagcagcacggacactctgttcgtggatcgtacgtgcaaccaattccttaccaactccggattcaccaaggatataaaccggagcttgactacgcgccactttagcgatggtggcccgaagctgagccatcggtaacgactcgccaaggagacgttggctggggctttgtggctgacttgacacaacagagcgttcacgattgttcaattccaaagcatgacggaccatgcctcgcaggacattcagatcaacaggtttgctgacaaagtcaaaagcaccttccttgagcgcctctaccgccagttcgatactgccaaaagcagtgatcatggccaccggggtacgtggataatgacgcacaatcttgttcaccagctcaatgccactgccgtcaggtaaacgcatgtcggtgatacaaagattgaacgagtcagactcaagtaacgcgtatgcttgtgccagattagctgccgttctgatacgcagccccatacgtcctagcgtaaggaccaaaagttcacggatgtcgcgctcgtcatcgacaatcagagcactgcgggattgattcatgaatgccaagataacgcagcagactgaagatggacaattcccatcgtcttcaatcgcacggcaacgcatcgaagatgccaatattaaccgcccatagggttgcaatctgcaatagcgacgctaacacgcagcaacggccacgctctctctaaatgcgaaagaatgtgaatgaaataccggggcactcacttcggaatcaatgcatacggacccggcaaagtaatccggaaacaagccccgccccctggaatggccacgtactcaagattggattgattcgcgttgcacagctcacgagcgatgtatagaccaagccccgtaccatggtcggaagtagtgaaaaaaggctgaaaaagctgcaaaacagccgcatcgggtataccaggcccctgatcaaggacatcaatccccacgctgcctccggtatctaccacctcaatacgcacctgtgctggagtatccggaaagcggccataacgcaacgcgttgtgggtaaggacagcgaggatctggtacaagtggcgtggatccaccagtgcctgcacggtactgtgcaacgtttgtatttccagattgtcatactcgcttgacaatgtctggcggtattcatcgacaaatcgggacacgaaaccgaccaaatccaaattttccgggttagcacgttcgcgtcttgccaagccaagcacgctctccacaatcccattggtccgctggcactgctttagaataatctccaacagccgttgatcggctttgtcaagattggaggactcttccaagagctgcgatgcatgtttgattgcagccaaaggattacgaatctcgtgtgccaaactggctgaaaaacgtccaagcgccaacaaagtcaacgattcggcacggcgtgaaacaacactgacatcatcaaggaaaattaatgtcaatccactgtcggcaagcagactcacaaagcgaggctggacctcaggttgatcaggcgctaatcgcaacggagtatcttcgtagtggcgaccgatacgccaacacttcagacgctttgtcaactccggagcaaccgtagcgagatcgtaatcactctcgaccaattgtctgtcgtatcccagcaacgcagctgcagtttcgttactcaaaccgattcgattagcagcatccaccaccaacacacccgtccgcatacgtcggataatcagctcgttgatctctgccaagttgactatctgggcacggcgcttttcagccagagcttggctagatctggcccgctgcgcggcctgatgacacatatacgccactgcagtgtagctggtgaaaaacataacgagctcggccagtgaacgtgaggagtcaccctcactgagtaccgtccagatgtattccacaagcatcgcaaccccagcaatccaagccaggatcatgctgaaacgcaaccgcaataagatggcggcggcggcaacgttaaacaacaacatcatcgcaatgccggcactggctttaggcagggcgtgaatagcaagagtggcagccaaaatgtcggcgacagtacttccaaagactaatggagtgaaccagcgctcattacgaccccagaccaacaaaatggtagccaacagcaaataaccgacagcgacagccgtgcccaaatatggatcactctcaggatccaccaatatcgacaccggactgaacaccaaggccgcgatcaatccagcctccaagatccgatacaaggcgagaaaataaagttcacgctgcggagcaaattcgatccgatgaatcagcgaagcgctgaacaacacgtgacggtgtcctaaggcagaaaagggatagccgagtatagacacgaccggcagcactatgccggatgaactccaacgagccccgcaaaaattggaagaagtaccaatcaggactatgaataacaacacaataattttgcgctccatcatcatagtgagcgacaatgaccagcccgcttgcacccatgacggtgtctgccattggcaaatatccggccttgcatagcgatcgtttccattctccacggtgacgcatgaatttccacgaataccaggcaaaacaactatttgccgaatacggcatccctgttccggccggacgcatcgcgtcttcagctgatgaagcggtcacagccgccaaatccttgggcaacggcccctggatggtaaaagctcagattcatgcgggcggtcgcggtaaggccggcggcgtgaaattctgcaaaacaaccgacgaagtgaaacaggccgcagcagcaatgctcggtaccaagatggctacttaccagtcggcaggtgtcgcactgccggtgaatctggtcctggtcaccgaagccggtgaaatcactaaagaactctatctgtcggtgttagtagatcgcggcacgcgttcaatcacctacatcgcctcatccgagggcggcgtggacattgagcacgttgcagctgaaacccctgaaaaaatccaaacgctcaacgtcgactttgtcgaaggcctacagccataccaaggacgcgatattggatttcacctcggcttggaagcgaaacaggttaatcagctgtccaaaatcatgattagcctctatcaattgttcaacgacaaagatttgtccttgatcgaattaaacccattagcaatcctgagcaatggggatttgtacgcactggatggaaaaattaattccgacgacaacgccacattccgccataaagaattggccgcaatgcgcgataaaactcaggaagacgaaaccgaggttctagcctcagagaacgatctgaactacgtcaccatggatggcaacatcggctgcatggtcaatggagccggacttgccatggccacgatggatgtgatcaaactcaatggcggcgaaccggcaaacttccttgatgtcggcggcggcgctaccaaagagcgcgtgacgaccgcattcaaactgatcctttcctcaaacaaggtcaaagccatctttgtcaatatcttcggtggcattgtccgctgcgacatgattgccgaaggcatcatcgctgcagtgaaggaagtgggtgtcaaagtgcctgttatcgtacgcttggaaggcaccaatgtagacgctggcaaacaactgctagccacatccggcctcgccatcatcccggctgacgacatcaacgacggcgccaaaaaagccgtggccgctgtcaccgtctgaactcaccgagaccctttaggaattcaacatgtctgtacttgttaataaaaatacgaaggtgatcgtacaaggcttcaccggtcaacaagggaccttccatgccactcaaatggtggaatacggcacccaagtcgtcggcggtgtcacccctggcaagggaggcaatactcatattgatctaccggtattcaatactgtgcgtgaagcagtccagaacacaggtgccgacgcctcagtgatctacgtaccaccaccgtttgcagcggatgcaatcttggaagcagctgcagcaggcatcaaagtcatcgtagcgattactgaaggtatcccagtactggatatgctacgcgttaaaaatgtacttaaagcatcacctgaaatcaccctgatcggaccaaactgcccaggcgtcattacaccaggggagtgcaagatcggcattatgcccggccatatccacaaaccaggtcatatcggtattgtgtcccgctccggtaccttgacttacgaagcagtgaaacaaaccactgacgtcggcctcggtcaatcaacctgcatcggtatcggtggggatccaatcaacgggctgaacttcgttgatgcgctaaaactattcaataacgacccgcagaccaaaggcatcatcatggtaggcgagatcggcggggatgctgaggaagccggcgctgaatatattaaacaccatgtgaaaaaaccggtggttggctttatcgctggtgcatccgcaccgaaaggcaagcgcatgggtcatgctggcgccatcgcctcaggaggctcaggaacagctgaaggcaagtttgctgcaatggaaaaagcaggcatcaagacagtacgttcaccgggggatttaggcgcagcgattgcttcgctcgtaaaatagaaccctccaatgagggcatatgatgcgttgttaagaaactatttttcaaagtttctccacacattacagtcgtatcactgaaaaacgcctcgataaataacgatgcctccagaaacccggaggcatcgttgttcatatcgttcgctagcactcaggtatcttcaatgcttaccgccatcatccagatgatgcatcccacataaaaaagtacacacaacacaatcaccgcactcatccccacctatttattaatagggatctaaccggtttgcatgggttaattcgggtggtaaagatcagacttacgaagccggaagccgataacctgccgcatcgctcaccggcaccggcatacagattcggccaaaaaaacaacagcgccgataagctcttggtggtttggaatgctccgtcagtacagcaaatcaagttacggtggcgtcagccggacggcggtgatgtcgatgccttcatctccatcgctggtgatgaaggcattagtggtgttacgcagggtagtggcgccaatgtccaggcgctgacgggcggcgatggcggcggcgtgggtctgggcttggagggcgaggtggtcgccgtagaggtgcccagtgccaaggttgtcgatgatgccgcaattggccaaggtatcggtggcggtgaattaggcacagccgccgaccacttccaggtaaccatgaagttaggtaggagtctggctgttgacttcattgaggatgacttgggcggtggcgatgccagcgatgctcacccagccgaggctgagccagaggccaaagatgatgggatgtggagcgcgcggtgggagttgcgctgcaggagcaggacctgcggtacctccggggtgcggtagccagtgctgaggcgacttgccacacacgcagagcacagttgtagatgagacgctagagatccttgttcatggtatccccattaagtgaaatgttttgagagcggtatgtgtttagaaggaccagttcaagctgaatccggtcacggtataggcgtttgagaaggtgcgtgggcggttaattggggcgcctacgaagacatcccaaaataggctgcggtggcctccacgcaatcccaaggcggtaccggcaaggtggttgccttgttgtaagtaggccgacgcccccccgatgtgggcataatcaagggcgaggtacgcttcttggtcgcctccaagggatagcccaagatcgttacgcagcagccagccgcgctcgccgatcaaggtagtttcgccatcgaagccacggacggtgtagcgcccaccgatggaaaaacggtcttgggtaatcagaggggtacggttccattgggcacgccaactgccggtatagcgcaaggattggcgacccagttgaaagggaaggttgaactgtgcgtcagcaaagtagattttgggacgggaggtgccttcatcaaagagttcttctggggcgggtaatgcgccaaaggcaccggtaccgcgccggaaacccagagtagtatccagtgttgcggtactgatgtagcggcgataggtgaggcccatttcccaacctgccatgcggcggcgttgtacgaggacttcggtatcgtcgatgaagtttttcgagtcacgggtccagccgcgtaggtagataccgcttttgctgcgggcggtacggatgaggcgccgggatagtttgagttcgctgttatggctttcaccgctgtaaatataggtttgttggctgcctgcaatgctttggtggtagttgtagccgctgtgggtagcggcgattaaccagttacctaagggcatggagtaatggagggtgatgcctcgggtcccgcgtttgctgccgttgaaagcagaacggttgaggctgatgtagaagaggtcattttgagtcagggcatggtccagagagagagtggctccggcctgggttttgccggtacttttgctgcctgagtcgtcaaaactggcattgaagcggacagggcggccttgggtccaggagatgagtaaatcactttgaccgggctgagagttgtctccttcggtgggaacgatttggatatccgcttcgactgtggggacgcgtttgaagttctctagaccttgttctatatcgcgcaggttgagtaggtcgccagggtgggcggggatggcgttccaaaaagtggcatcgggtttggtgccgggagcaaaacgaatgtgggcgagtctgccgggaatgagggtgaggtgaagttctccgcttttgaggtcttgtggggcagcaaggacgcgtgtggtgacgtagccacgggagatgatggcgttttgtacgcgggagataacaatgttaatgcctgcggtaccgaggcaacgcccgatagctggatcatggggtgggttggcggcggtcaaggcccactgaaagcgggcggctttgtcaccttcgagaaaaattttctggatagggaagcagggggtttcgtcccgtggcaatagggagggggtttttcccggtacttcttgtaaacgggcatcggtgtcgcgctccagttgttcacggagtgcgcgttcacgttcttgttggcggagcaattcttgatcgggcggtgcgacttgggcatatgcgctctgttgttggagcagcgctgcgatcaatgggagcaggcaccatcgaatatatggtttgaatcgtattgccatggtgttcaaagaagacgtttttgtgttctgaatcatccctttaccttgcttgtgttgctgtgaaagggagcgctccaagtgcatgcaccctattcattcaatgaatagtgaattttatcgaggtatgaatggggaagaactaggagttaccaggaggaaatcgctgcaaaaactactgattctgatgtaggagatttcctacgcgttggagcttgggaaaggtgtgaatgtgttcacagaagggcttgcatacgagggctagcaatcgtctgcaggggctgacagtggttgggaggtgggaaccgggactgtgtgccagagggtgttgcgtgccccatgacaagggggtatcgggcaggttaaaggaaagaagccgaatcactcggtaggcgttttaggatggggactcagccatggatggctaggtcaatcatgggcaggcggaggctcgtaggctggggtgtttcgggaggcagcgtaccggaatcagtacgctgcaaggtttgcttggaagggccggagacgttcgaaggtttggattgatcgagcgttgcccagggggtcgcaggtcactcaatgggaggtatcaagggtgattcaggtttagagggggcctgtttgacgtaggtatcaaaccaattgagcatttcgtagacgaactgttcgttcgattccaaggcggcataccaatgtggttcatggggcagcatgaccagtttggcaataccaccattgccacggattgcttggtagaacttgcgggattggaatggttcggtgccagggttggcgtcatcttcgccatggatcaggagtaatgggtgtttgattttgtcggcatagaagaagggcgatgctttcaagtagacgtctttggcttgccaaaggatgcggcgttcgttctggaagccaaagggggtgaaggttttgttgtatgagccgctgctggccactccagcacgaaacaggtcggtatgggcgatcaagttggctgtcatgagagcaccgtggctgtgtccggtgatgccgatgcgctcacggtcgacgacgcccaaggcgacggctttgtctacagcggcggtggcatcggctttgagttgttcgaggtaggtatcgtaggcggttttggggtcgccgacgatggggaaggatgcgttgtcgatgatggcgtagccggccaggaggagcagtcggtagtagggtaagcgggtgaaggtgtgttgggaaccagtgacttggccagcctgggtgctgttggcaaagtcagtgggataggcgtaaaggatggccggtaggcgttggccttcttgatagtcggggggggtgtagagggtgaaggaaaggtcaacaccatcgttacgtttgtaggtcaccaggcgttttttgatctgacgcacttcgggggtcggatcggtgatatgggtaatgcgggcggtgctggaggcataggcgggttcgccctgggcaggggttgggtgctggggaccgagggtgcgtaggaaggcgttaggggggtcgatgacggtttggtgccaggtcaggaattttccgggttcgggaacaaagccaaggaactgttcgtaggcggcgctgttgctgcggaataggcgttgggtcttgagtgtgttgaggtccaggcggtctaagaaagggcggtcgccctgtggggaggcgccctgcccgctcaggtagacggcatgaccatcctggcgtacgacggaggtgccgttgggaaggaggtggtagataaacgcgccggggtctgcatagcgttcatcgctggaaagatcccacaagatgcgttcgggatgggctgggtggtcaaggtcaacaatacgagtgcggcgccagtgacggttttcatcttcttcactgaggaaggcaatgtccggctgtgcggtccagtcaaagccatcgaagcgttgtacggtacgtgcaatctcaacgggtttggtggtgaagggggcttgcaacagcatgaggtggtcgcggtgcgggacgttgatgttccagtcgccgtgatcctgggcctcagcccataccaaggtggccggatcagtggggcgccagtcgaagtcgcgcgggccttcggggacgccatacacggggacgcggtccgccaatggcaggcgggcgatcggtgcggaggcatttttgacgaggtcaagtacggcgatgtcacgggcgaagcgctggtaagtgacggcatgggagtacgggggttgaatggcagcggtcaatacatgtaggccgtcaggagcgcctgtgacgctgtcgtacaaggcgggaactccaacgggacggaggacgccggttccaatatcaagtaccgccaattgggaggcgccgtagtaggcgaacaaggaatcatcgtaagcgctggcaagggtgtcgcgggtttcataggtgctgctctggcctttgccgccgaaggtttcttgaatatccggaccagcggtgccgggagtgttggtcggcggtaatccctgatgagggggcacgagtttgaggaggagtttgctgctgccaccaagccattggacggtatgtccaaagatggggttgagacgtacgtcgggtatgtgtcgtatgtggccggtggcggcatcgccaatccacaattcaacggagtcggatgcaacgttttggaagacgaagcgctggccatcgggggaccacaaggccatgccgggacaggctccgggcgggagctggacgggggtctcgcgaccgccgacaatctcgatcagggagaagtgggcaacgcaagatggaataccgtagccgccaggggtgtcgtggcggctgcggttacgaggttccaggcgcacgccggccagtttcaagtagggttgggcaacacgggtaatggaaggataggtctgctgggtggtcaagaggagacgctggccggtggggtcaaggctcggtgttggtgtcagtggtgctttgagcactttgaggatgtgctctgggggggtacggtagtcagcaaaggcggggatgacgccaaaggaggccgtcatcacaagggtcagcagtgtgaagcagaggtctctacgggagggcataggggttgtccttgggatcatgacttgaaacgctggagacgtgggaagggatgcaaaacgggttgcaacagggatggttcgctgaacatggcgggcatgatgaaggtctgggacgcagacaagggttggtacccggacggtaggtgagtcgcagaggttcaggagatgggacatggcgagtgtgccatgtcctcatgggcttttaatgggaatagtactcagatctggacgatgttgcctgttcaggcagggtgtacggtgccgggatcgtcctctgtctcatccgggatactcaaggaagcatccagacgctcgactgcctgaagtttttcaccattggataagcggatgagggtgacgccttgggtattacggccaacgcgcgaaatctcggagccacgggtacgtaccaaggtgccgccatcagagatcaataggacttcgtcggtggcacctaataggacggcagcaaccaggcggccattgcgctcggtggtctggataccaatgacgccttgagtgccacggcctttacgagggtaatgagccaggggggtacatttgccgtagccgttttcagtggcggtcaggatgcagaggatgtcatcctgggtgggatcaatgtgcacgctgtcggcagtgttggctgtctggatgtcgtcatctgccgtttcttccgcttcttcgagcatatccacaccagttgccggttcggcaatgatgaggctgaccacctcttctccttcggtcagtttgataccgcgcacgcccgtggcggtgcggcccattgagcggacagtgttctcactgaaacgcacggtcttgccattggaggcaaagagcaggacatcacgttcgccatcggtcagagcaacaccaatcagggcatctccttgatcaaggttgatcgcgattttgccgcgcgctaagcggaatgcaaattcgctcaagggagtctttttgacggtcccttggcgggtggcaaaaaacacatagtggttctcagcgtattcgcgtacgggaaggacggcctgcactttttcgcctggctccaaggggatccagttgatgatggggcgacctcgggcgttggagccggcttctggcaattggtacacagacagccaaaatactttgccggtgctggtgaaggtcaacagggtgtcgtgggtgttgaccagccagagatggtcaatgaagtcttcttcttttgtggtcacagcagcgcggccacgccctccccgcttttgggcacggtaggcggacacaggctgacgcttggcatagccggcgtgggacagggtgacgacgacatcctccggtgcaatgaggtcgaggatgtctaggtcttcttcgctatggcggatctcggtacggcgtacatcgccatattcttcacgtatcttgaggagttcatcgcgaatgacctgtaataggacatccgggttctccaagatgcggatcaggccgacaatgatctctagcagctgctggtactcttcggcaagtttgtcctgttccagtccggtgaggcggtgcaggcgcatttccaaaatctgccgtacttggacttcggtcagttgataggaatcgccaatcagccccacgccttgcgggagatcttccgggcgcgatgcttcaccacctgaggcactgagcaatgtaccgaccaatccaggtgcccaggttttggcgagcaggcgctcttttgcttcttgtgggcttggcgaggttttgatcaggtgaatcatctcgtcaatgttggccagggcaaccgtcaaaccttccaggacgtgggcacgggcacgggctttgcgcagttcgaagatggtgcggcgggtgaccacttcgcggcggtgacggatgaaggcttgcagtatctgtttgaggttgagtagttgggggcggccgtcaaccagtgccaccatgttaattccgaataccgactccatctgggtctgttggtagaggttgttgaggacaacctcagccgactcgccacgtttgatttcgatataaatccgcatgccgtctttgtcggattcatcacgcaattcgctgatgccatcaattctcttttctttcaccaactcagcaattttttcgatcaaacgtgctttgttgacttggtaaggaatctcagtaacaacgatggcttcacggccattgtcggccacttcaatatccgccttggcacgcatgcggacgcgaccacgaccggtacggtagccagcaacaatgccagcggtgccgttgatgatgccggcggtggggaaatccggaccggggatatattccatcaatccatcgacatccagttctggattatcaataagggcaatgcaagcgttgatggattcgacgaggttatggggcgggatattggtggccatgcccactgcaatcccggacgatccattgaccaatagattcgggaaccgggtcggcatgaccgttggttccgtttctttttcgtcgtaattgggctgaaagtcgacggtctctttatcgatgtcagccatcaggtcgtggctgatccgcgacatgcgggactcggtgtaacgcatcgcggcggcaggatcgccgtccaccgaaccaaagttaccttggccctctaccagtaagtaacgcaacgagaagggttgcgccatacgtaccagggtgtcgtaaacagactgatcaccatgcggatggtacttaccgagcacttcaccgatgatacgtgccgatttgaagtaggacttgtcgctgtgagcaccaagttcatgcatggcgtacaggacgcggcgatgcacaggcttcatgccatcgcgagcatcggggagtgcacgacctacgattacgctcatcgcataatcgaggtagctcttacgcatctcgtcttccagattgaccttgatgatttccttggcggtctctgccattcgggtcccgtcatgtaaagcggcgcacaagttcacaagcaaccgtgggatgggctgccgaacaaagatggccagggttcaatttaatccggtgattttatcatgaaggcactacggccgctggtacttaccccaaagaaacaaatacttgtgggagtgtggggatggaaagaaggtggttcccaggcgcattcagttgccgaatgtggcacgcatctgcgccgcatctggagattgaatcacaccgcgctccgtgacaatggcgtcaatcagggcacccggtgtgacgtcaaagactggattccaagcagcaataccttcggccacggtacgcacgccactcacgccgagcagttcctccggatcgcgctgttcaatctcaatcgcctctccagcggtggtgtccatatcgacggtcgcagcggaggcaaccaccatgaatttaactccatgatggcgagcggtaatggcgagttggtaggtgccaattttgttggcggcatccccattggcacagattctgtcagcgccaacaatgacccattgcacctggccagatttcataaggtgagcggcggcggagtcggcaatcaaggtgacgtcgatcccgtcttgctgcaattcccacacggtgagacgtgcaccctgtagccagggacgggtctctcctgcgaatacacgtgcgatgcgcccttgggcgatgccagcacggatgacacccaaggcggtcccgaaccctgcagtcgccaaggaaccggtattgcaatgggtcagcacgccactgccgattggaatgagtgcggcaccgtaggcacccatgcaacggttggcggtgaggtcctccctcgcaatggactccgcttcgcgcgccatcgcttggcgccaatcagcgtgggcagcgctcagggtgcggcgcatgcgcgccaggacccaggcgaggttgaccgcggttgggcgtgcagcatggaggcgttgtaatgcgggttctagcttgcgcagtgcttcaatgccatcgaccgcttcaatctcacgcgctgcaaggacggcgccccaccctgcaacaatgccaatggccggtgcaccacgaacgatcagggcgcggatggcctgtgtgacatcttcgctactgtggcactccacatactcgaccacaaacggcaatttgcgctggtcaagtaatttcaggaagtggccggtccaaaggatgggacgaacctgatcgtaaagtgtgtcatcagggggcaagggatggtgcattggagcattgtacgcatccgttgatagacatttgggcctgtcgagaataggaaaggtcggtgtgtgcgatcaggtgacgctacacaggtgttggtgtcggtgggatgcggtttacaggcggagggcggctacaggagaagagtcagaagagcggtttcagtagacgagaaattcggcgcggcagcctccatcaacccagattcgatcagcatcccagccccaattacgatctttttcgcagggtgtggtggagagctgcaggaatacactcacctcgtgctgtaccgatgtaccacagctcatgcgttgacgttttttggattcacaaatcaagcgccacggcatatcaacaaatccagatccatcttcggcaccgagttcaaattcacctttgcagccactggacacccagatttcatggtgttttctcccccaggtcacatttttcttgcagggaaataaggaaagttggcgcagtaagcggacagggacaccgcgtagcatcacggggcaactgacgacagaaccatctgaggcgcagcgcaatatccgccgttgtggatgcacaggatcaggcagggcagcaaattcggcctggcacccctgctctacccagacgccctctgggtccacatcccactgactgccatgctcgcaactgtttgcggagagttggcgcacgagctgcactccatgcgtggtcagcatggtgcaatggacgcgttcttgatcgtgggactcgcagcgcacgacgtcaggaggcgcttcataacgatctgcagcgatcccaagccagggaacgcctccgagcgccaagagggaaatgcccctcttgatggcaggcatccccctagaaagaaggtgtgtgctgctgcattgggatccaagaattgggggcataaggaaatcaattaggaactcacatggtgagacaaaagtcctttaaacaaacatccaagtgaaacggcactcgccgatcggcagtcgacagaacggcactgatacacatgggggggacggtatcaacccgccaacagagatgcaaggcagactaagcagagataaaggaaaacgccatgacgtcggcaatggatgcggttgcgctcatagccatcagtaatcgatccacaccgacggcgacaccggcgcaatcaggaagacgggacaaaacgttcaagagaggttcgtcaagaggcatctgcggcaatccgcgtgcggcacggacttgattatcgtgttcaaaacgacggcgctgttcggttgcgtcgttcaattcatggtaaccgttggcgatctcgtggacgcctaagtagagttcaaagcgctccgccaccggggggtcatcggaacggatacgcgccaaggcacactgtgtggctggccagtcgtcaatgacggtgatgcggtcggtagggaatgtcggctggatgcggtgcgtcatcagtaggtcaagccaatcatcacggctcaatccaccggggttgatctcgccgccgtccaaggcttgacgcagtacggtttgcggagcacgcaggggatcaatgtcaaggatgtcaaggaacagttgacggtacgtggtgacatgcaatgtggctgtgcgttcgacaagagccagcgcttcacggaccaaggcggtggtttcctcagccaggcggtggtgatcccagccgacgcgataccactcgagcatggtgaattcggggttatggcggccgcccgcttctccgttacggaagacgcgccccagttcgtagcagtcgccgataccagcagcaaggagacgtttcagggggtattccggcgaagtacgcagccaacgttgtgctgctccggcatcacaatgcccagtaaaacaggtggtgaagctgtggatgtttggctcggtatttccggcggcggagaggaggggtgtttcaacttctaagacgccgcgatctgcaaagaagccccggatcatggtgtttaaacgggcgcgcagccgcagggtgtcgatgagggtcatcgggatgtttcgttcaaacgacggctgagtaggtcacggtgttcatcacagtagcctaatgctaggtagaagcgcttggcggcgttgttatggtggttcacttccatgcgcagcaggtcaaaaccgagtgtctgcactcgggcttccagatgggcgatggcgtgacggccgtaaccacgaccacggaccgctggctctaggtagagttcatccagcaatacataacgtccgcctagttcaaggctgcaacacagggtgaggacggcgtagccgacgtgctctccttgcgacgtcagccacaacaggacttcgccggatgtaggatcggccaggagggtacgcaaagcaggcaaagaacgtagggaatcaaaaggggtggcgtcttcggcatagaagcgccggatcatggggatcagtaggggttcatcgacaggagtggcaagacgccattgcaaggtggccgtgtccatgtctgttgttctattgggcactgtattgtcccagaaaggcgagtagacgggcttcatcccaaatatcgacatgcaaggcgtgggctttgtcgagtttggagcctggatcttctccagcaacgaggaagctggtttttttggacacgctgccaacaattttggctcccaacatttctagtcgagtggcggcggcttcacgggtcaatgacgctaatttgcctgtcagtacgacgctctggccgttgagtggggcagtgtgggcacgatcggcggatggcagttgtgccaacagtacgtcacagcagtgctggaggcggcgggctaaggagatgttatcaggagattggaaccattcggtcaatgattgtgcagcaggctgggacacgcccgcctgaaggagtgtatcaagggcggcttcagccaataagggcaatgtgggagcgagggcggctaactggacagcacgcagtggagtgatttttggaatgtccaagtgttccaagaggctagccagggtgagttgatcacgcaatgtagatgtggggggatgggtatcggtgatacgcacgccacgctccactaggtcatcaatggcctgttggttggcgggctggtccataaagtggccgatggcacgtgccacttcgcctccaatatccgggacgcatttgaataagggccaggggagttgccgaatgattgctaagtccccgaaggagtgcgccagtgctttggcggtggtttcgccgacatgggtcatgccaagggcaaagaggaaacgctccaaggtagtctgccgtgagcggtcaatggcagcaatcaggttctgcgcccacttggtggcaatctttttgtggttccaatcaaagtccggccattgggcacgcaatacgtcaatctgccagtgcttgggcacgtcaccttcaccagacaggtccacacccacggtgcgcagtatctcttctaattgttggtaacgcatgccggtcacatggtcgcgcgcttcgcgcaggagcatggtgggggtctgggcattggtgacgaggcggagccgcagcagttgatccaggctcaggtgatacaggtcagcgacgccgtggacaacggcggcatccaccagtaattcaatgcacttgacgcccagtccttcgacatccatggcgcggcgggagacgaaatggcggatggcctctttgcgttgtgcgggacaggcgagttcaccggagcaacgccatacggcggcgcctgtttcacgaacaatctcggaaccacagacggggcacgccatcggcatgctccatgcggtggctccaagggggcggctgtcggtgatgactgtgacaacttcaggaatcacgtcaccagcacggcgcacgatgacggtatcaccgatgcgtacatccaagcgggcgatctggtcagcgttatgcaaggtggcgctggtaacggtgactccagcgacttgtacgggggtcaggcgtgcgactggggtggccgcaccggtgcggccaatctggatttcaatggcttcgacagtggtggtttgttcttgggccggaaatttatgggcaatggcccaacggggggcacgagcgacaaaccccatttcacgctggccggacaggtcgtcgagtttataaacgatgccatcaatatcaaacggtaaggtatcgcggatggtttccatccggcggtagtaattcagtagttcttcactgccatacaccagctccacgaggggggagacggggaatccccaggcacgtagggaggccaggatttcggagtggcggtggaacgatacgtcatcggtcacttcgccgataccgtaagcatagaagctcagggggcgctgtgcggtgatgtgtggatccagttgccgcaaggagccggcggcgccattgcggggattggccagcactttccatccgcgaagccgggcctgggtgttgtaagcttcaaagtcagggcgtggcatatacacttcgccgcgcacttctaacacggttggccatgtgtcgctttgcaagcgctgcgggatggtaggcagggtacgcaggttggcggtgacatcttcgccggtgacgccatcaccgcgggttgctccttggataaagatgccgttctgatagcggaggctgatcgccaaaccatccagtttgggttctgcggaaaaaccaggggctgtttcgcccagacacgcggtaatacggcgcacgaattcaaggacttcgggatcactgaaggcattgttcagggaaagcatcgggacggtatggcgcacttcggaaaatgcggtggcaatggtgtgtccaacacgctgggtcggtgaatcaggcgtcgctaggtctggataggccgcttcgagagcgtccagttcacgcaacatgcggtcgtagtcagcatccggaatacgtggttggtcgaggacgtggtagtggtagttggcctcttgaaggcgacaacgcagttcagcggcacgctgggcaggatccagggggatcatgagggcgggatcagtcacttataaaacaagaaatgattgtataagtgaggcgctgtgagatgttgcagggttgttcggtgcgttgggcatggttacaaacatcgaagggttgcaaggcaccttagacaccaccagagccgtcgcagtgggaagctaagcggggtacggtgaggaaaagactccggggagtgttcaatgcggttgggtgtcctcggggttattccgttgctgatgtgcagtgcaagaaggtgggtgaggtatcaggaggagtcaccaggacagggaatgatggttggttggctcatcaggtcttggaggtcaggaagcgggggcgcatcggggaaacggcaatccgggaaaggttgggccggaggttgcaacatcagtgcgatgtggcggcatgcggcggaaggactctatgcacctgaagcatccgtcgatgggtatcaggcaggcaaggcccgttcggggggcacacagatgcggagcgattggacatggtgatgtgatcagcaagcagtaggattggagcaatccaacactttgggcatcttcaatggtgactcggtgtttgtttcaaagcgcggtgcagtcagccccgtgaagcacggggataacttttcatggattgttccgatcaaggtcaggtgcttcagagacacaaggcagatgcggtgtgggggagacgctgcgtcccatcacactcgctctacaatctctgtgcacttgacctgtgcttcttcggtttaccagcgtgagttcttgatcagtgggggcacttgttgttggcggtcgtaggcgcgtagttcgtctcggatatgggcgatgcgctggcgacctagtgcattacggctttcgtccagtaccacgccatccagcagttcggccatacgctggacggtgggcagcattttctcccaggcatcaagcgcagtcattggtgccggcaatgtcaggaaaaatgagatggcggggatctgcatttcacggatgttggccatatcaaagctaccaggtttgaggatgctcgccatgctgaagatcgggccgtgctccggatagccttcaacgagacggtgaaatacattcatgtatccaaagatcatcccggttttctctgcggccacgacgatgtcctcgccgcgcaaggtgtgttctgctttggcggcaacaaacaggaggatgattttgtcgaagtggttggtgggccgcttgcctaactgaacttctccaggtttattggcctcaggattcacttgctgctgcgaaacggaggcaggcacttcgtcaacgccttggggtggggagttgtccgcttcggtagacaacatcggctcacgccgttcgcggggcggctcttcttttttcgtgcgtactctgtgagccgatgtcttcggtgtgctgaagaagaagacagcggcaacgaacagtattcctacaatcgcaatcccgatgcgtaacagggtgacgtcagacattcagtgtctctccagcgatgtacttatcaggtcatcttattggggcaaggatggcacgtcagctcccgtcaaccaaacgggccgcttcggccaaatccacgctgactaggcggctcactccgggttcacgcatggtgacaccggacagttgctgagcggcttccatggtggatttgttgtggctgacaaacaggaactgcactttctcgctcatttctttcaccatgctggccaagcgcccgacattggcttcgtccaggggggcatccacttcgtcgagcaggcagaagggtgcggggttgagttggaagatggcaaacacaagtgcaactgctgtcatggctttttcgccgccagacagtaaggagatgctggagacgcgcttgcctggggggcgggccatgatcgctatgccggtgtcgagtaaatcttcactggtcagctccaggtaggcatgaccgccaccaaataaacgggggtagagtgtctgtaaccccgcgttgacgcgatcgaaggtctctttaaagcggcctcgggtttcacggtcgattttggagatggcctcctcaagtgtctgtagggcaacggtcaggtcctcatgttgggcttggaggtattcgacacgctgtgcggcttcgttgtactcgtgaatggccgccagattgacaggttccagacgacggatgcgtatatccagttgttctatcgcggcctcccagtcagccgggttggcagcttcaggcagggcatccacaaggtgctgtaagacgaagccgactttctccaccgccgcctgccgctgttcagcgcccaaggcgagggcctgttggtcaaggcggcattgagagatgcgctcgcgctgggacagggcctgttcatcgcgctgctgacgggtgtgttcgaattggcgcagttcggcatcaatgccgtcaagatgagtacgtgcttggcccaagaggtgttcggtacggactcgttcgctgagggccgcctgatgttgttgctccaggatctccaccggggagtcaccttcaccgagttggatcatcagttcttctaagcgtgcgtcgagctggccgcgctggttgtccatccgctgcagtgtctgactcaaggacaccatttgggtacgctgtgactccaaggtcaatgctaaggcatgcatagcttcacggacgctgcgtgcggcttcacgcgcttggtcacgggtcacgttaagttgttgccgctcagcgtgcaatgcctgacgccggctctctaggtcacccatgcgggtgactgcgtcatccagtgtggcgcgcgcagtacgggcttggtcacggctggtatccaaggtttctaataattgggcaatctcggcttcaatgtgctggatacggccacgggaggcctctagtttgccgtggtgggcctggcgctggccggccagttcggagacgccacgatgtgcaatgtagagttggcgttgtgcatcttcgcggtgctgttcggccatcaataggtggtcgcggaagtgcgtcaggcgatgttccaattcagcttcgcgttcttgcagggtctcaatctgggcgcgcagggtttgaatgtcacgttcacgcagtaatgcgccttgctcagcggctccggaacgggatacgcgtagccatccttcccccaggcattcaccgttgcgggtcatcacccagtcgccctcgctcagtgttgcttgcagggcgcgggcagcgactaaatcttcagcgccgtgcagatgggtcagtaaacggcggatcgcaacaggtccctggactttagcggccagcgatgtgggggccacttggatctgtgtctgggtgtcagccaccaatgcgatgtggccttcgttaaggccgctcaatgcttcaaccaacgtccgcgggtcgtcaacaaggacgccttcaatcatgtgaccaagggcgctttcaagggcgttttcccagccgctttcgacacgaatacgttctccgacacgggccgccgaactcaatccatgggcctgcaaccaggtcatggcggcgccctgttcctggccaagggcagcctgttgcagggtctcgagtgaagatagacgaccacgagcggtctgggcatgtttacggacatcggccagttcggtctgcgcagtacgctgctggtgctgtccgtccgccaatgtctgtttacgttgttcaagttggtcgttgaggccgtccagtgccgctttctgggtttcgtattgcacttcgatctgctcgaaggcttcggccaatgcgtccagatcaagtccggcacgttcggcaagcaataggtcacgccgccgctcggcgtccagggcctgacggtccaagtagtcaacacgggtacgttcaacttcaccagcacgcgatgcttcgctggtctctcggttgtggctctcccaacgctgctgccagtctgtcaacgctgcttcggcgtcgcgcagtgcgtcttgtttaaattcgttctgctcacgcagcacgtgcaactggggttcgttgttctcgactgcctcacgtaacaccgccagtgtggcggcatcgtcccccatgtgacgggtcagatcaatcagttggttctgtgcttcatcgcgtgctttgtgcaaacgctgcgacatttcacgttgatgttggatctgttgttcgatgcgggccagtgtggcacctacttgatagacatcggcctgtgcggttgccaaggcttcggcagactcttcacgccgcacgcgggaggtctcgatccgcatctcagcttcacgctgctcggcaagtaattgctgtaagcgggtttcctcttgaagtaatgcctggcgcaatgcttggagacggatgtccagttcacggaattgcaaggccttgcactcggcatctttaacacggcgttcttcttgcaatgtctgatattgctcagcttggcgcgcttggcgcttgaggtgttcaagctgtttaccaatctcttcacgcaaatcgttcaggcgatccagattttcttgggtatgacggatgcggctctcggtctctttacgccgttctttgtatttggagatgccggcggcttcttccaggtagatacgcaaatcttcagggcgcgcttcgataatctgactgatcatgccctgttcgatgatcgagtagctgcgcggccccaagccggtgcctaggaacaagtcggtaatatcgcggcggcggcacttggtgccgttcagggagtagacgctggagccgtcacggctcacggtacgtttgaccgaaatttcgttgaatgccgcgaattctccactgatggtgtggtcgctgttatcaaagatcagctcaacggtggcctgtgccaccggtttacgggcggaagatccggaaaaaatcacgtccgtcaacgaatcgcctcgtaaccggctagctgagctttcacccatcacccaacgcacggcatcaataatgttggatttgccgcagccattaggaccaacgatacaggtcatgttggttggtagatggagcgtggcaggatcaacaaacgatttgaaaccggacagcttgatcgtggacaggcgcataggctgaaggttccaggcaccacaggctgatggtgcccaaacgtaaggaattccgtgggaaatgtgtccttaggaggtcacgcgccaaagcggcacaaccaccacaccaatataaaacgggcggagtatagcggccacaaccagaacacggggacaactaaagaaaaaacgacaggcgcagtcaggcgcctgtcagacacgatggaggtaaaccgaatcaggggacgccctgaacaatcaccttaacggtactttcaacatcagcgtgtaggtgcaataggacgtcatattcgccaatcaggcggaacggaccctcgccaagaatgacttctttcttttcaagcggtaagccgacggcagtaaacgcctcagcaatgtcgcgcgcgcccaccgagccatacaatttaccttcggtggaggcatgcgcagacaccgtcacactggcgccctcaaacttggcggcacgcgcctgagcctgatccagttccgacttggctttggcttcatactcagcacgcttggcctggaaggcagcgagatttgcttctgtggcaggtacagcaactccctttgggaggagaaagttgcggccataacctggtttgacagtgactttgtcacctaaggcaccaaggttggcgactttttgcagcagtatgagttccatggtaagtgttccgttattcgttagcgccaggatctgaaacggcgcaacggatgctgtccgaataggacgggaaagatatcgatattgccggggtggtttcacgcaggaagcatagtcaaagcagagaccagcttctcatgctcagggacccgtctatctaaatatcatggttatcagtgtagggaatcaacgcaaggaaacgcgcacgtttcactgcggttgtcaattggcgctggtatttcgattttgtgccggtcacacggcttgggacgattttgccattctcagttaaatactggcgtagggtattgagatctttatagtcgatctctttaatgccctcggcagtaaatttgcagaatttgcggcgacggaagaacttagacatgaggggactccttaagcagcttcggcgttgccgccatcgttatcactatcgttagagacgccgacatcaccattttcatcgtcgtcacggcggcggcgctccggcttgtcgcctttatcatccttgctcttcatgatgaacgactgctcggtatccgggccactgcgtttgattgctaagtgacgcaaaatcgcatcgttaaaccggaataaatcgactagttcgttcaatacagactgctcaacctcaatgttcatcatgaggtaatgcgctttgacgagtttctgaatggggtaagccagctgacggcgtccccagtcttctaaacgatgaattttgccatggccgttctcaatcagcgctttgtagcgctcgagcatggcttgcacttgttcgctctggtccggatggaccaatagcacgatttcgtaatgacgacccattattatttaaacctttgtttaataaccttgtggatgtagccctgagagggcagacagccccccagcaatgccggtggagcaaggccccaccaagaatcaggcggagggctggggagtatggcggttccttgctctggccgcaagaagacgccttgtgattccataacaagcagtcaccggctcaaacacagctcaggcgaagcatcagcaggcccattccggccaggatgaggcagcaatcaggccttgtcgacgtctgtggtgaagctctcgccacacccacattcaacggcggcgttgggattaacgaaggtaaatgtttcgctcaagccgcgtttactgaagtcgatacaggtcccatcgaccaagggcaagctgtgtgcatcaacgaagatgcgtacgccgtcctgttcaaagacgctatcaccttcgcgctgttcgcacgctagatcagtaaaatgcccccagccggaacagccagtacgggtgacgccaaaacgtagtcccagcgtaccgggagtctgttggataaaacgacgcacacgatccaaagcaaccggggtaagcgtgacagtcatacggaaactcccaaaactctgcggctattcaagatgaattacaaagtataacggcggcgcttccgaaagacttcgcgaagcattgagtgcgacacaacgacatcagacagccaaaacacatctcgccacgatcgccgcgccaaggccatcaagatacactcgcgcgttcaagaagaaagattcactacgacttaattaaggtgaagcgtcatgacggtggccagtgttgagcaaatgttctccgggaaaattcaggtgggcagtgaagtgacagtccgtggctgggtacgaacccggcgcgattctaaagcgggcctcagttttgtcagtgtcagtgatggttcctgcttcgctgcaattcaggtcgtcactccagcgcatcttcccaattacgaaacagaagtacgcaaactcactacaggttgcgcagtcatcgtgatcggcaccctggcaccctccctgggccagggtcaacagttcgaaatccaagcccagagtattgaggtcgtcggttgggtcgaggatccggaaacatatccgatccaacccaaacaacattcattggaattcctgcgggaggtggcgcacctgcgtccacgcaccaatctgtttggtgcagtcgctcgtatccgccactgtctatcgcaggcggtacaccgtttttttcacgagaatggttattactggatcaccacaccgatcatcaccacttccgacgccgaaggtgccggacaaatgttccgcgtctctacgctggatttagtcaatctaccgcgcacggagaccggcggaatcgacttttcgcatgatttctttggaaaagaaacgttcttgaccgtctccgggcaactcaacgtagaagcctacgcactggcactaagcaaggtgtataccttcggcccgacgttccgggctgagaatagtcacacgccgcgtcaccttgcggaattttggatgattgagccagaaatcgccttcgcggatctggctgaggatgcacgtgtggccgaacagttcctcaagtttctgttcaaaacggtactggaggaacgtaccgacgacttggcattcattaccgaacgggtagagaaaaccacgatcagcaagctggaagggtttatcaagtcaccattcgaacggatcgagtacacagacgccatcaagctgttggaaaggtcggggaaaaagtttgattttccggttgaatggggactggatctacaaaccgagcacgagcgctggttgaccgagaaacacatcggccgcccggtggtggtgacgaactatcccgaacacatcaaagcgttttacatgcggctgaacgacgatgggaaaacggtcgcagcgatggatgtgttggccccgggcatcggcgaaattattggcggcagccaacgtgaggagcgcttggaaatgcttgatatacggatggcgcaattcggtctggacccgacacattaccagtggtatcgggatttccgccgctacggctcggtgccacacgcggggttcggcctggggtttgaacgtctcatggtctacgtctgcgggctgagcaatatacgcgatgcaatcccctacccgcgtgcgccaagcagtgccgagttctgaaacaggttcagcggctgtctgcggcatgccaatggcgagtgcgaacgtcatcgtcgttcgccacagtgtgctgaaccatctccatcacctcattttcaaccacctagtgtctgtctgtggtgagtaggacgaacaccacatcctctgcggttaagactgaagcaccttggtctttcaaatcacacatcatcgttggtcttaaatcatccaatgggatactggagtaacagcacattgagtcgcgataaatccggttgtcatcatcacaatgcaatccttactcactgcaatagagcggacaatgtttcttgatacatcgttcgctgttgccaagggatccacttcactcagatcacatgaaccaagggcactgcaccgatcactgctcagtagagtgaggacgttcagttcttcgtgaataactgataatgtcgctttggctattttccgaaggtaaatcgcatcgtcatggcataccctgtagcgataaccgcacgaaggacgctatccatgacgtctcttcagtcgttaacacacaaccgctgtagagtgctcggcagatgaatctgcatataaaaaggtcgatgtggccgcactatcaaacacattgatacatgtttcgcaatactccagaagcaatccttcatcatgcaaaatgcaaagggttggcttccgttgcaatagtgatatggcacagatgcacattcgctcggtgagatcacccaagcggagacgttcattgggtacatcggatgcgcctatctgctgtttaatcaataagacgtgaaagtgaattgaatgatgaaagattttcctgccatgatcgcactctcagatattgctgctgctgtcaggaaatatcgcctggtgggcatgctcggttggcaagacgtgcgtcagcgctaccagcgctccgtgctcgggccgttttggctgaccatcagtatggccgtgatgattgcaacgatgggactcgttttcggccagatactcaatttaccattcagcgattttctaccgtttctcaccgcgggcatcattatctggagctttatttcaacagccattaatgaaggctgcggcgcattcacctcggcagaagcaatcatcaagcagctgccaatcccactgttcgtacacgtcatgcgcaccatctggcgcaatatcattattgtactgcacaacatcgttattctgcctgtggtctttatcgttgctgggaagcacattagcttcactgcgctgttgagcatcctcggctttttagtactagtgttaaatcttggatggattaccttaattctgagcgtgatttgcacacggtatcgcgatttgtcgcaaatcgtatccaactcaacccaagtcgcgttctatttgacaccgatcatatggatgccaacgcacctgcccgcagcaacagcgaactatttgcttaagtggaatccgatttatcacattgttgaaattgtgcgtgcaccgcttttaggcaatgtgcccaatgctttgaactggcagatatctatttcacttgcagtctttggatggatattggcaacctttttttacaaccgttacaagctccgcatcgcctattggctctaacaaaacatggctcttatcaaatttgagaacgtctgcgtcgattttccaatctataacgcaagcagtagatcactaaaaaaacaactcatccaggccgtcaccggtggtcagttgcgcaaggaagaaagcggtcgtgttgtcgtcagtgtattaaaagggttgacattcacgttgcaagacggcgcgcgcgttggtctgctcggtcacaatggtgcaggaaagagcaccttgctgcgcctattgaatagcgtctatttcccttcctcaggccaagcactgatcgaaggaaccaccgggtcgttgatcgacatttcactaggaacggacccagaagccaccggacgcgaaaacatctatctacgtggcgcactgcttgggatgaccaagagcgaaataaaccgctcggtgaatgaaatcatcgaattctccgaactcggcaatttcatcgacatgccgttgcgcacgtattcgacaggcatgcatctacgcttagccttttcggtatccaccatcgtgtacccaaagatcctgttgatggacgaatggttatcggttggcgacgaaggcttcaagcaaaaagcggaaaaacgcctctcagaacttgtacaagcaaccaatattctcgttgtcgccagtcactccaaacaactgattctaaatacatgtaatcgcgtgatttggttggaacatggccagatacggatggatggcgacgcacaggaggtatgtactgcgtactttgggtgaggagtgtgatacgtcactcacgtgttccgtgttcccatcaatggcagatcccatgtgcagcacacgtcagcactgtgttgaacacgactaccaccttcagtgagcagagccacgccatgttccttttggacatgcacaactggatctgcaacaaggcattgccgcattgactcaccccactcgctgcaataactcccgttggtgctttgtcactggccaaacgcattgattgttcgcatacggcttcccccaagggagctgacacctatcgccatgatgaccgctatcagtgcattgatgcacctcaaggaggaatgatccgtgataaaatcgagacttatttttggtattcgatcacgatggacgtcattcagcagagaaccaacggactcgccatcgctagtctagtcaccagtatcctcggcatcagttttttgcccttcatcggaagtttgtgcgcgatcatcaccggccacatggcacgcgccgaaatccggcgtcagcccgacacattgaaaggcgatgagctagcgatcattggtctgatacttggttggctcgtagtcatctcgacagtagtatttcttataacgctcttgcttttctttggaggtctaggttggtttatccacctaacctcagcgcgttaacgacttttctaatattcacagcagcgcttccacacgttgagcagcgcactccatccattaggagcaacgctgctcggcaatattgattgactgagtgaaaggtacaacagctaaggtttcgaaacactgtcctgacaccgcacaatgaccattcaaccatccctctccaccacacatcttagcccctaaaacagacactcctgcatcccttgtcagagatggacatacagctatcctatcggcgttcaatacctgacagacgcctttgccgggcgctaatttgagcaatatgtattcccttttccgtcccctcctgttcacctgcgacacagagcgtgcccatgacatcagcctgtgtaccttggacatcgcctaccacagtggagcattacctctactgacacgccacccacgaccgttacccaccacagccttcggtctgaactttcccaaccctgttggcttagccgccggactggacaaaaacggaactcacattgacgctctattcgccttgggctttggctttatcgaaatcggcaccaccaccccacgtccacaaccggggaatcccaagcctcgccttttccgcctgacgcaacaacaagcagtgattaaccgcatggggtttaacaacctaggggtagatgcactggtacgtaacgttgcaggcgcgcggcaacgcaacggcccccttgggatcaacattggcaagaacaaagacacccctaatgaacaggccagtaacgactatcggtattgtctggaacgggtctatgcactggcggactatgtcactatcaatctctcctcaccaaataccgctggtctacgagcgctgcaagaggaacagacattgcgtcgcttgatcggagaattacgtgaagcacaagaaacgctggccgccaaacacggccggcacgtaccgatgctcatcaagatggcaccagatctcagtgacagcgacattgatgcagcagcacgtgtactcaacgagatgagcgtagacggagtgatcgccaccaataccaccgtgacgcgcccgctcctaagacaacatcggctggcaagcgaaacgggggggctgtccggtgccccactcctgggacagtccaccttggtgctacgtcggctacgtacccacttacctgaaactattgctcttatcggtgtaggcggcatctgttgcggtgccgatgcagttgccaaaatggctgccggtgccaacctggtacagtgctacaccggcttgatattcaaaggcccacagttggttggagaatgcgtggaagccattcgccgccgccgcgaagcctccagtagcgggagggcgagcactcaatgagcctgcagatcaatactcctgactggatcctccatgccaacgcgccactgcgtgacctgaacacctttcatatccaggcacaagcgcgctggctactagagatcattcatccgaccgcactaccacaagcattgacgcaccctcacatcgtcggcttgccaatcttagtgcttggcagtggcagtaatgttttgctcgccgccaatcctgaggagtgtgtgctgcgcttcgttaaccgcgaggtgacgatccttgaacatcggatcaatcacgcgctagtacgcgccggtgcagggatggcttggcatgacttggtgctatggtcactgcaacagggactgtctggactggaaaacctggcgctgatcccaggtacagtcggagcctgctcaattcagaacatcggtgcgtatggggtgcaagtcgaagaattcgtgcacattgtggaggcctatgatcagaccgaaggccagttcgtaaggctgaccgcatccgaatgtgaattcgcttaccgcaacagtcgattcaagcgagagccaaaccgctacctgatcgcggcggtggaattccgtctgccgctactgcatgaactcaaactcaactacgcagggatcagcgaagaactggaagcgctacagatcacattgccagaaccacgcgatgtcgcccaggcagtcatcaatctgcgtcgccgcaaactaccggatccagaggtactcagcaacgccggcagctttttcaagaacccatatttgccacgcgaacaggccgaacagttacgccaacaccacccaacactccccatttacccaggcgagacaccagaatcaaacaagctatcagcagcttggctgatagagcagtgtggctggaaaggcatccgcgaaggcgatgctggagttgcgccacagcacgcactggtactggttaactacggcgaagcaaccggtgccgagctgctggcgctggcacgacgcatcgccgcttcggtgcaggagcgcttcggtgtggcgatcgagccagaaacacgcctgattggagcacaatggtgactcagagacagatgccgctacgtgcggcaatgctgatgctgttcagcacactgtcgtttggcatgatggcaatcaccatccgttacgcttccactcaaatacccacgacagaaattgcattcttccgcaatgcgttcggcctgcttgtcctgctcccattgatacttggcccaggcaagccgctaccacgtactcaacatgggccacgttacatagcacgctcaatgctcgggctgatatcgatgctgtgcaacttttgggccattagccatctgcccctcacacaagccatcaccctgtcctactccaccccgctgtttgcgaccattctagccgccctatggctgcacgaggtcgtgcggctacggcgcttgctagcgatactggctggcttcgctggcatcctggtgttactgcaaccctggtcaagcacgttcagtccaacgctactcgtcgcactagccgcagccatactgaatgcagtcattacgatccaaatgaagcaactctcgcaccttgatccaccagacaccgtcgtgttgtatacctacgcgttctgggttccattatcgctactactcgcgctgtggcagtggcactggccagcaggagtggagtgggtatggctcatcgccaccggcatattcggcacgatagggcagctcctgtggatccgcgcattacgcctgggagaagtctctgcattacaaccaatcggcttcatgcaactaccgctggtgacactgctcggatggtggttattcggagaatatttggatcgctacaccgcgttaggcgcatccatcattatcggcgcaaacgtctacatcacccatcgagaagcagtgctggcacgacgcaccgcggccgaaacgatacaaaaaggtgttcaatccaacggaatcaatcgcgctcagggtccgtcctagagggcaatgctagcgccgttgacataaccgatccgcatcgcgaaacatcagtaaatacagcccgatcacccaaaccagcgccgcactccagccaccaagaatgtcagaagggtaatgcaccccaaaatagagacgcgaaacactcaacaacaaaacaaatatccctccaaacaccatcaataatccacgccagcgcacatcccacagcagcacaagcaacactgtcagcatcgccattgcatccatcgcgtgggcgctgggaaagctgaacccatgagccggagcaattgtctcccacagcgtgggccgctcacgctggaagagatgcttggcagcaatattcaagagcttcgcaccaacaagactgcatccagcaaacccagcgacataccaacgccgctgccccaacaggatcagcacaatcaacacatcaatgccgcccaacccataccagtaaccctgctgagtcagcacgacaaaaaatgcatcaagattcggcgaggccagggtgcgtatccaatacaacaacggcagatcgaagcagaaagactgacgttggtaaacgccgacagccaacacaacacacagaccaagaggcagcaacacccctaagcacagcaactggtgatgccgcacatgagcgcgtcgccaacgacagaagccgacaaacgcatcagtcggggaaacgggcatacctgcgttctacgtaatcgtcaactaaagcaatgaaatcctgggcaatattttcaccacgcaatgtcaccgacttctcaccatcaataaacactggggcaaccggcatctctcccgtgccaggcagcgaaataccaatgttggcgtgacgcgattcccccggcccgttcaccacacagcccatgacggccaaggtcatcgtttccgcaccggggtgagtgattttccacacctgcatcttgtcgcgcacgtgctgctgcaccgtcttggcgagttcctggaagaattccgaagtggtacgcccacaccccgggcaggcagtgaccatcggagtaaaggcacgatgaccagttgtctgcaacaactcctgggccacaatcacctcttgggtacgtgattgccccggctcaggggtcaacgaaatgcggatcgtatctccgatcccttcttgcagtaatactgccagcgccgctgaggacgcaacgatccctttactcccaataccagcctcagtgagaccaagatgcaaggcaaagtcacagcgcgctgccatatcacggtataccgcaatcaactcctgcacaccggacaccttggccgagagcacaatgcgatcacgcggcaaccccaactcaacagcacgctcggcagagcctaccgccgaacagatcaagacctcgcgcaacacctgagcggcatcccatggctgcttgcgccgattgttctcatccatcaattgcgccgccaacatctgatccaatgatccccaattggcgccaatcctaatgggtttgccatagcggatcgcgcattcaatcaattggccgaactgcaaatcccgcttcttgccaaaaccgacattaccaggattgatccggtacttggccagcacttccgcacacgccggttcgtcagccaataattgatgaccgttgtaatgaaaatcaccgatcaaggggacgtcaatgcccatcattgccaagcgttcggcaatacgcgggattgcagcagccgattgggcattgttgacggtcaacctcaccatctcagaaccggcacgccacaattcggcaacctgtttggtactagcaacaacgtcggctgtatccgtgttggtcatcgactgcaccaccactgggtgtccccctccaacggtcacgtgaccaatattgactgcctgcgtacggcgccgcggccaaggtacggcggaatcagaagcaacttgaggagtcacgatgtcgtgcatatacgtagtttaaaccttgagccactgaatcactcccatctttgtgctggatcaacatcgacacccacagacacatcgtcaacacatctgaccgcaatcgccctgcctcgcacagcacactcagccagccagccagcacacagataacccacatcaatcatatgctcgccatgcgaaagtttcttccaaagcaccccacaacctaaatatgatgcagacgcatgcatacctctgccgcttcattcttacgcactctgtgtaccttgcgctgggtcgccactgccggacaggtagtgaccatcctgatggccacccatgcgatgggcttagcattgccacaggggccgctgtgggtcggggtttgcacgctggcactgtttaacctatatgcacagcgacgcctttcacacacccatgtcacttcaccgaacatcgaattcggccatatcctggtcgatgtcgccgtactcacctggatggtcggctggagtggcggcatcagcaatccgttcggctcactgttcctggtcctgatcgcactggcagcattagcgttgccgttacgctgggccatggcagtcgcggccacttgcgtcagtggctacttagtcagcgccgcattcggcctgccactaccacacaaccacttcaaccctctcaccttgcatatgtgggggatggcagcgaattttctgctctcaacggtgatggtcctggtattcaccacgtggctggcacaggcactacacgcccgcgaacgtgagatctcgctactgcgtgaacgtttcacacgcaatgaaggcatcatcgccctggcaacccatgcagcatcggttgcacacgaactcaatactccattagctaccatgacgttgctcgccgacgatgtcgccgagcaatgccagcagcttgagttgtgcgaggatttggaaacgctacgcgagctactgacgcaatgccgcaaccgtgtgctgacactcgccgcacccgccgacaagctcaacgttgatatccaagtgcataacgttctagatcagtggcaactaatgcatccgacgatccatctgaaacacaacgaggatgcgccgctacaattgatgctggaacctggagtaggccacctcatcatggtgcttctcaataatgccgccgacgctggcgaacgcagtgacaggcggcaagttgatttgaatctccatattcaggatggccagttatacggtgaggtgcgcgactatggctctggtttcgaagcgccccagggactcttaccagggatgctgttccacacccaaaaagcaaatagcatgggcgttggtctggcattgtcccatgcgaccgtcgaacgtctgcaaggcgacatctggatgcaacccgccaaaggacgcggcacacgagtaagctttcgagtgcccttgaaggaaacatccacggcatgaatcactccgccgccaagatcggcttgctagtcgacgacgacacactctatctgcgcaccctacagcgcagtttgggacgccgtggcgtagacaccgtgaccgccaccgatacagtcagcgcattaaccgctgcgcgtagcatgcttccaagtttcgccttgctcgacctaaagctcggccaagattcagggttagcgctcatccaagaactgcgcgccatccgcagcgatatgcgaatcctgctcgtcaccggctacgccagcattgccactgcggtagaagccattaaacgcggtgccgacgaatatttacccaaacctgccaacatcaacaccattctgcgtgcaatcagcgaagacacagcaaacggattaactccggacaaggacgaatctgctttacatacgatgactccgctcagtcgccttcagtgggaacatatccaacaagcattacacgagacggacggcaacatctccgccgccgcacggttacttggcatgcatcggcgctctctgcaacgcaagctaaccaagcgccccagccctggaacgctgcacgattcagatcattaaaacgtgatagtccgaaacgctatatagagcgttcaatgagacatccccgcttccccaaccaggacactgctgcacatgaacaccacagccctgggaatcctgcctatcgcaggctagagaaggatcagcatatgacggattcacagcagcgcatgaagcgctctaagacgctgccggacaaaacaaccgtggcgaacacgcgaccacacagcaggggtgtaccacggctcctcaaacaaacacacgacctagggagaaatcaagaaaggccgacctgcttcatcacttcagaagcatagtcttcgacgatcttttcaatcccttcgccaacctccatgcgctggaaaccaattacatcagcacctgcggccttcaccacttgctcgacactttgatcggcattaagcacatacggctgaccatacaaagtcacttccttaactattttgttgatcttcccactgataattttctccaaaatatcggcaggcttagatttatctttctcagacatcttactcagctcgatctccttttccttttccagaaattcagccgacacatcagcaaccttgttatatggcgggttcatcgctgctacatgcattgcaatgccgcgagccaactcaacatcgcctcccttgacttcaaccaatacaccgatacggccaccatgtacgtatgcggccacattatttgcactatcaatccgcgccagacgacgcacccgcacattctcaccaatcttggcaatcaccgcagcgcgagcttcctcaacagtctctccagacggaagcttgacactctttagggcttcgacatcaaccgccccagcaactaacgcagcctgcgcaacagcctcggcaaatgccaaaaaatgactgtctttggcaacaaaatcggtctccgaattgatctcgaccaggacagccttaccgccatcatgaactaccacaatgcggccctcagcagcaatacgaccagcctttttatcggcctttaccaaaccggatttacgcagccattcgacagcagcgtcgatattgcctgcattttcactcagcgcttttttgcactccatcatgcctacgccggtgcgctcgcgcagttccttgaccagggatgcagtgatttccatagaattacctcgtatatacaaaggccggaggcgagcaatgctcgccagggaggacaggcgagaatccgcccgtccctatgtagatgaaatgctgtaatcgtccaggaaaatgggtccacagaaaatagacagagattcccaaataccgccgagaacggggctgcaacgcagctgtatcggactgccgcttactcagccgcagcgtcgctagcccttttacccttcttgggctgagcttgacggcccttcttgcccgcatctggggcagaagcaaactcttcctcgcgcacagcagcagcatttggcatcgccgccttaccttccaaaacagcatcggcagcggcacgcgcatagagctgtacggcacggatagcatcgtcattgccaggaatcgggtaatccacaagtgaaggatcgtaattggtatccaccactgccacaactggaatgccgagcttcttagcctccttgattgcaatatcctcatgaccaatatcgatcacgaagattgcatcaggaatacggttcatatccttaataccacccagcgaagcctgcaatttaccggactcacggcgcagtctcagcacttcgtgcttcaccagcttgctgaaagtgccgtctgtctcggctagctcgagctccttcagacgggcaaccgattgcttcaccgtacggaagttagtcaacgtgccaccgagccaacgctggatcatgtagggcatcccacaacgttcggcctcttccttgatcgcatcccgcgcactgcgcttggtccccacaaacagaacgcttccgcgcttctgtgcaactgcggaaaggaagttcatcgcatcgttgaacagaggaacggttttttcgagattgatgatgtgaattttaccgcgggcaccgaagatgttaggtgacatcttgggatgacggtaacgggtctggtggccaaaatggaccccagcttccaacatctgacgcatcgtcacttgaggcataacagtcactcctagagagcggaatctcgcatgtgtcgctatgcacacacggttctgcaggcttcttaccttaaagaaccggcgatgattcctgggtttaaacttccctgccgcctccgtgccgaccccctcatggaagcaccccgacacagagcaaacggtagcaggtgtagattcgccagtgacgtctggcgtggacgctgttttcacagcagtaagcacttcaactacgaaaactgaagaagtctaactgctgaaccacgcctagcacaagagaaacccacacgaaaagcaccgatttaaccagggtctattcatcctagatggtcttgaattgatgtcttacagtcatcaaatgaacaacacgtgcccagaaaaatcttaggcaactccatcaacacgtccgcatttaaagattgtttactccataactcataaaaaagtgttgacgcctatacagaacctacggataatcttcagactatttttctaagaaacacgcgcccgtagctcagttggattagagtacctggctacgaaccaggcggtcgggagttcgaatctctccgggcgcgccatattctttggaaacccgcccacaggcgggtttcttctttcgtgcatcaaagatacgagagagtcgcaattgtcagatgaatgccgccacgtcatcgtttcgcggaatccccctcttccaagtgaacacctctgaccgtgccgatggatattcagctatctactggcaatcttcgcttctccccaacgatcgcaccgagagtgcattgcgatttcaactgcaatggcagcttctaacgacaccgttcacgctcaagcaaagcaatgcgaaggacccacctacacatgccttgcccactggaccagctccatatattgaaaacttggcgaagcagcaccatccgccccctgctcagcctgtaggaaactcccacgcatgcctgcaccacacatccccaaccgcctacaacgtctgaaccatctacgcatcttgtggccattcatgcgccgccatcttgccttgttctccggatggctgattgcgttggcggtctcctcagcagcaacgctgaccctaccaagcgccttcaaacaaatgattgaccacggtttttccagcgaggggcaaatcaatcggacctttgctctactgttgttagtcgccgtgattctggcagtaggtacagcagcgcgcctgttctccgtctcgctactgggcgagaagatcatcaccgacctgcgtagccacttatacgcacacctcataggattagatgccagctttcacgatcgtaatcgcagcaacgagctggtgtcgcgtcttgccacagacagtgaactgctacgctcaatcattggatccacaatgtcagtagcgacgcgtagcaccgtgactgcaatcggcagtctcatcatgttattcatcaccagtccacgcctcgccagcctttccctggtggtcatcccactcgtgatacttcccattgtcttaggcgcacaacacctccagaaagccgcccgtaccagccaggatcgcattgccgacaccaatagcttcgctgctgaaacattacgtgctttacgtacagtgcaagcctatgcacgtgaacattacgaacgtacacgcttcgaccgcacactggaaacgagtttgcaggccgcgcgacaacgcattcacatccaaacatgggtcaccgctgcaagcatcgtgttgatattcagtgcaatcgtcggagtgttatgggcaggtgcacatgatgtcattgctggccgtatgagcgcgggcacactcggtgaatttgtcctatacgcactgatcggcggtggttccatcggcgcccttgccgaagtgtggaacgaactacaacgtgccgctggtggcatgggccggattttcgaattactcaaagagaaaaacacgctcaccgtaccagccacacctgccttgctaccccagccattgcggggagaaatccgctttgaacgtgtcggcttccactatccacaacgcccagaaacacctgcacttgatgacattgacctgcatatacgcccaggggaaaccatcgcttttgtcggcccatctggtgctggcaaaagcaccctgctatcactattactacgcttctatgatcccacccatggacgcatcctgattgatggtgtggacctacgccaaaccgatccgaaagtattacggacacacattgcactggtacaacaacaaccaacactgttcaccgcgagcgcaatggaaaatatacgctatggacgactggacgccaccactgccgaaatcgagatcgcctcacgctcttccgaagccgatggtttcatccgtgccctgccacagagctatgccaccgagctaggcgagcacggcatgtccctgtccggcggccaacagcaacgtatcgcaatcgctcgcgcactcctcaaagaagcgccgattctactcctggatgaagcgaccaacgcacttgatgcacaaaacgagcaggcagtacaacaggccctggaacgactgatgacagggcgcaccacattgatcattgcacaccgcttagtcaccatcctgaaggctgacaggatcgtggtgatggaccaaggccggatcgtcgcccaaggtacccacagcgaactcatcgccgctggaggcctatacgcaaagctcgcacgcctacaattcatcgaataaacaggtgatcggaagacggctgcaaacacctctgctctcttcacccgatacaaagtcaccgcaatcacctgtcgctagcgctccaccatcagcacagacagcgacctccgcatcgtcatcgcactctgcgcacaaccaagcttacaactgaatcacaacatgcctcaccgtaaatagcatcaacacagcagctatcacaccacaagcacacatcattcctcatgttcatgcatagcatctgcataaacaattgcacccagatgattcacctgcacattgctattttgtcgatcaaaacagaagttctactgaatttgagccccaccccgcccagcgaaaataattattcgccatgaatcactccaagaatccaaaagatcatttattcatcaggaatttcttattgaagatataccaatccatgactgatccaatcacgcaaagaaattgcgcatatagacagcaatattcggaaaataccaagacaaagcgccgctgcatttaactccgcaaatgccagacataccagcaaccagaaatctgctgcaaccttccaacatcattcaatcctgtttcttttaaacatccccgcaaaatacagatttacaactccccctaacctgatcgtcataccccccgagtcatcaagactttcatgaaacttcgcattcatgcacaggccaatcagcgataacgaggattccatccacaggcatgcttgcttcccagcgtcacagcaacatcacaaaacgcttacttagctttttcaaatgtcatcaatcacacgatgccattccttccttgataaatctcacctgtatcaccctgccgctgttcaccgcatgaagtgaaacgtgcaacacatcgcacatcagcgaacggacctgtacagattcctgcatggctgacacatatcagcggcaccgactacgcatccatcaccacgtgtcacctgctgatcttgctaaacaagtaactatcattgctgcgctcgcggatcaattgccaccttgaataaggatccaacatcgaaataacacccacatatagcacccaacgcaacgtgttcaacatgcccctcagaaggttgcgtctcctgcaatacctgccccatctatcagcaccaaactgggcaagcacaatcaacatcctcacgccgcccagaacaaaaagcgcgcagatgtacgaaatatcttgcaataccacaccaatcgtactcaacagatacttggaaattttttaaaagcacggctcgcctcttggcgaacttgagatcctatgtctaacatcaacttttacgaaacccttcacactgacttaaagacgtattacacgtaattgataatctatgatctgatatcgcagtccagtacagtgcggttcctggcacatacccacaccaatgtggactctattcctaaagtaaaggcacatatgccatacacgatgacaatgacctccaatagtgcaaagcaggcgcatagaccacacagatcaagagccatgaccccacatcaaagcacggctaaaatgcgtgtcccaccgcgtcgaaaattgacaccatgaccattgatttttccatagcccgcgaaaaaatggtcgaacagcagatccgtccatgggatgtggtggatctgcacgtacttgatgtactggcacacatcccacgcgaggcgttcgtccctgaaccataccgtaccctagcctacgcagaccttgaaatccccttacacggcggacaaacaatgatgaaacccgtcattgaggggcgcctgcttcaggccctgatgttgtcaccagaagaggacgtattggaaatcggcaccggcagtggcttcctcactgcctgcctggcctcgctgggacacgaaatagtcagcctagaaatcaattccgcactgggcgcatcggcacatacccacctagataccattggcctaggcagtaacgtacacattgagcaagccgacgctttcacttggcaacccgaacgtcagttcagcgtcatttgcctgactggtgcagtgaacacgctgccactgcaatttctgcaatggctacaccccaacggccgtatgttcgctatacacggccactccccggcgatgcaagctgtcctggtgcgtggagatgcctctaccccaaacatcacatccctgttcgagaccgatctggcttacctcaaaggtggcgagccagccctccaatttcatttttgatacctgactcaaggataacgctatgatccgccgctgcctcgccctggccgtgaccaccgccctatttcccgtcgtttcacaagcgacaaacctattacaagtctacgaaatggcacgcgctgctgaccctcaattaagcgcagccgaatccactcggctatacagcgttgaagggcaagttcaggcacgtgcagcgctgctgccgcagatgagcggcacagccaccctggcacgtagccgcactgaatacgacggtatcagcggatcagccatcagtaagacccgtcaatacagcatcaacggtacccaaactctgttcaactggagccagttttccaaccttcgatcacaacgcgcgatcgccaaagccgccgatttcacactggaatcggccaaacaaaacttgattgtgcgcagctcagctgcatatttcagcgtcttgatcgggattgaatcgctgatcgccgccgaagcgaacgaagcatcagctaagcgccagtttgattacgcacagaaacgtcttgaggttggcctatcacccattacagaccttcatgaagcacgtgccagctacgaccaagcccgtgcagacaccatcactgcacgcaacacactgcaagactactaccaagcattgacagagatcactggacaacccgtcactgacctgcgcggcctccctgaagacttccgaccagaagtgccagcgaaattcagtcacattgaccagctggtcactgaagccatctccaacaatccatcgctaaaagcgcagcaattgcaagtcaatgccgcggaatccagcatctcagccgcacgtggcgagcattacccaacgctgtcattgagtggaagcctggggaaaagtaaagcctggggaacctccagcggcgcaatgagcgcactcattcctgaccgggaccaaccgattagcgacaccaacaacttacagttaacgctgtcaataccactctttgcaggtggtgcaacccaatccagggtccgtcaggcaatcgcacaacgcgacatccaacaggatacctacgagcagaataagcgcacgctaaaccgtaatacccgcaatgcctaccaaaatatgattgcaggcatcagcgaggtcgaagcgcgtcgcttggcagtcgtctcagcacaagcggccctagatgcttctcaagtcggcctggaagtcggcacccgaaccctgctggacgtggtacagaaccaacgtatccttttctccgtacggcaagcctatgtacaagcacgctacaacttcctgcaaaaccgtctcctactttcccagaacagcggcaccctgagcattgaggatgtacaagagatcaatcaattgctgactgctgattccgagagaaaactgtaaggagaagtaaggagaaacatacgatcaggtgttaggacgcacgaaccaatgccattacaggaacgtggtccgtgttttctgctgctttacacacgatcgcaaaaggcatcccggcattatcgctgcaacgatcagcatcaaagatacatctggcgacagcgattgatgccaatgcgattcctaacacacctcaggaaagacacctccatcggcaatcacatgactctgttcatgggatgatctgcctttggtatttttcggatcgagtgagaaggccatctatcacgaagtaaagaacttatctatacctcaaaggtcatcctactatcttgaataacactcaagataaggatcccttttgatgtgatcgcgccacctgaaaggatggctgaaccgctacgcggcgcctgatgatcctcaatatttacctataaataaggcattgcactgctgctgtcaaaatcaaacaaattcatcacgaaacatccaaccactactcaagcaacgacaaaccattgcgatcttttctaggtaggaatcaaacaaagacttttgaaagaatcgctgaggccagtatctttcaccctaagcaactgtttctcgactcttgccccaagaaatgcaacacagacacacattcaacctggcaataacaactgctccaacacaagaccatcagcatccacacacaacaccgacccttgctgataccaatcgccaagcactacacgcgtgcaggtacgctcagccacctgcaacgtgtgcaacgctggacgatgcgtatggccgtgaatcatccgattgaccccatagcaagcaaacatcgccgcaacatcagcaggcactacgtcagtaactttttcaaactgcgtgcaatcatcttcctgtttcaatccagactggtgcgcgtgactggccagacgcgcctgctgtgcaaaagcaaggcgcgcggaaagcgtctgcgtcaaaaactgcgcaatgaattccgggtcacgcgtctgtgcacggaacgcttgatacgcaatatcgtcggtacataacaggtcaccgtgtaacagcaccgtgggttccccatagagatcaacgacacatggatcgggaagaatccggaaaccagcacgcgctgcataatcggcacccaccagaaaatcacggttacctggcatgaagtacagcggcgtgcccgcatcggcgtgagtgcgcaacgcagccgccaccctatcagcgacttctgaaggcatatcgtcaccaatccatacttcaaacaggtcaccaagaatataaatcgcatcggcaccagacacctgttcccggaggaatcgcagaaataattcagtcaccacaggacgcaacggatccaaatgcagatctgaaataatcaaagtcgtcattcaatcattgtagtagacccagagagcaggattacatgtaaaacctgacgcaatcactgaaatattgaaagaaaatttaaaataccgtatcgcaccaaacagttggcatgccgatacacacatgactggctctggcaatgactatcacattattcttggcaagcacgctgctaaccctcgtcacaccaagaaaatcaatggaatgggcagcctatacatatttcaactagccccgctttttaaagcaggcaataccccagaacgcatctcgatcgtgcgaaaaatagaacatcaccacacgccaacaacacgcattaatacacccgcaccattagcttttgtagtgacataacaatccaaggcgcaccatttgaatacgctgtttcttgtcgtagggcaaccaacgcgttacaccacattgatctcaataacacaacaatcacagcagtattgcaacgcaatatatcgtcattcaggggacgcgataaccattcaataaaaacggctctgcaatacgattatcaccttccctactttactatcggcagcagacgctttggccaagagagatcacggccaacacaggcatatccaggccacagaaaacgcacaacatcaaggctgacctgactgcaccgaacaactcactctcttgcccatatcagcatggaagatacgtcaaaaaccgcatgcgcaacaatacagtacgctcaaccgtacacaccatctgtctcaaacgacagacagtttgaacacgattcctaaatccaccattgcttcaacctctgcattcaagtcgctatgcagcagcggccgtgaggccaagcaccccttgggaacggtcaacatcagtacatcgccatcgacatgcagatccaacataggcacccaatcgggttcgcgcgcacgatgcagcaatgccgccagacgcagcagcgcagctctgcggcgaaccgacacccgtaggcggtcaggtaacacgtcaaacgcgttcttcgacacatgacgacgatgcgtacacaccagcacagctagtacttgctgctcctggcgagagaaacctgcaatatcggaatgctccagcacgtagctgccatgcacgtggtagtgactatgcgcaatcactaaccccaactcatgcaagcgcgccgcccaacaaagcacacgggcatcgtcagcatccaaggcccagggaccacacgcctgctggaacaggagctgtgcagtcgtctccacacgcaacgcttgctgttcgtcaatggcatagcggtgcatcaacacggccaccgatatgtcacgcgggtcgttgtcaccagcgcggccgagcatgtcgtagaggataccctcacgcattgctgccttgctgaccagcagcttttccaggccaagcgtctgaaacacggcctccagcaccaatattccaccagcgatgatgggacggcgatgagcagacaaaccaggcaaatgaatatcttcaatgcgcttggctttgagtagttcctcacgcaatacaggcaacgcttcggcggtgatttcccccttggcaagcttcatctccgtgcagatcttggcaatcgttttgtgcgtccctgaggaacccagtgcctcctgccaacctaatgcattgtattgagccgcaaattgttgaaactcggtaccgatctcagtcagtgcatcattccaccgctttttggacaatttaccctctgggaaaaaacgccgcgtactggcgatacacccgacctgtaagctctctcgctccagaggctcgaaacctttgccgatgatgaattcagtcgagccgccaccaatatcaatcaccaaccgatgctgatccaatcggggtggctgcgcatgggcaacaccaagataaatcagacgcgcttcttcgcggccactgacaacctcaatcgaatgtcccaaggcggtctcagccaacaccaggaaggcctgcggcgaacggagtcgacgcaccgtattggtagccaaagcacgcacatggggagaaggcatattacgcagacgctgaccaaagcgcgccaagcattcgagtgcacgctcacatgccttgctcgacaatccccctttagcatcaagtccatcggcaatacgcactgcttcacgtagacgatcgaccacgtgtaactgaccgagcagataacgtgcaaccaccatgtggaaactattggagccaagatcaatggcggccaagaggtcaccgtccttcagcgggggataggatggcaacgtattgggcatagagggtctatattaactgaaaatcccgccagcgctgtaaacatcaccggcatagtgcaaagcaacatctataaagactccagtagagccacctgggccgagtatggcgcatgatctgtctcgggaagcagtttccggtaaacgccatcactccccaattcccaagcattgaggttgtcatccaagtaactctgtaaaacatcagaataaatacgtttcgccaaatccggattcaagatcgggaaacagatctcgacccgacgtagcaaattgcgctccaaccaatcggcgctggcgcagaacagttcaggcgtaccgttattggcaaaccaatacacccggctgtgctccaaaaagcggccgacgattgaacgcacgcggatgttttcggatatatcctgcacgccaggccgcaacgtgcaagccccacgcacaatcagatcaatttgcacacccgcctgcgaggcgacgtacagtgcgcgtacgacctgtggctcattcagcgcattcatcttggcaacgatgcgggcagggcgccccttccgtgcgaacttggtctcacgttcgatgcggaacaacacgccagcatgcagggtgaatggggactgcaataagcactccagcttcatcttgggtgctaacccagacaattgcagaaatagttgatgcacatctttaccgatcgctgcgttagcagtcatcaagctcaaatcggtatatatccgtgccgtaccactatggtagttgccagtgcccaaatgcacgtagcgacgtaattttcgaccctcacggcgtacgatcagcaacatcttggcgtgggtcttgtaaccgaccacaccatagaccacttgtaccccagcctcctgcagcttatctgccaaaccgaggttggcctcctcgtcaaaacgcgcgcgcagctcaaccaccacggtgacatccttgccactgcgtgcggcttgaatcagtgcatcgacgatggtcgaatctttgccagtgcggtatagggtttgtttgatcgccagtacatcagggtcagccgccgcctgacgtagcaaatcaaggactgcggtaaaagcatcgtaggggtggtacaacagcacatcccccttggcaatgatctcgaaaatgtgatcactgttacgcaaagtgcgtggattgaacgggggatacttcagttccggacgcaacaccatgtcatagacctgactcactcggctcagattgacaggaccgttaatccgatacacagcgttttcttgcaacccaaaattctgcagtaatgtacgcacaatcggggttgggcagtcttcagcgatctccagcctgactgcaagacgataaccgcgggtcaccaactcattacgcaacgccagcgccagattctcgacttcatcctcatccaccaccaattcagaattacgagtgacccgaaattgataagcccccctgaccaccatgccaggaaataactcaccgacaaaagcagacagtactgaggacaagaagacgaagttttgagaaccatccctggacagatgttggggcaactcaataatgcgcggcaaggaacgcggggcacgcacgatagccaaatgaccagcacgaccaaaggcatcaataccgttaagcaccaccacaatatttaaggttttattgaatattttcggaaatggatgcgcaggatctaaaccaagtggcgataacaccggcatgatttcgttgcgaaagtaaccacgtaaccaacgtttctgacgcgcgttccaactgttatgactcagtacacccactccaagggcggcgagtgccgggcacagcacttggttccagcagttgtactgatcatggacgagtttggtcgttaggtcgtgaacagcgttgaggattaccgtcggcctcatcccatcaggcgctggcggcaaaccaaattcctgtgcatggcgcacggtagccacacggatttcaaagaactcatccagattggtgcaagaaatacacaggaagcgcagccgctctaacaacggcacctgctcatccaatgcctgtgccaacactcggaaattgaagtcgagctgtgatagctccctgttcaaatacagtccaggatcacggaactgctggctgacatcagatgctgaaacaggttcaatgggagaagatttagacatagaacgtcttgagacgaatagagactaagggcgagagagacttggaacagtgaggccacagtaaacccacgccacacgaacaggaattatttcaagcatgggtatcaaggcggtatcggcacagattcagattcacgcatggcgacacgggctgcagcaaagtggcaggagaattcactccccttaccaacttcactgatgatgtctaagcgtgcctggtggagttccaacacatgcttgacgattgacagccctaaaccagtcccccctctctcacgcgagcggctgctggaaacccggtaaaagcgttcggtgattcgtggtaagtgtgaggttggaatgccataaccagtgtcgcaaaccatcagcaccacgccatcatcttcgcgttggaagcacaccctaacgctaccgccagccggagtgtaacgcactgcgttggtaatcaaattggaaaacgcactgtgaaggtccttattggagccgaaaagatcgcagccagcattgtcgatcacttcaatcgtatgacggccttgactgtgtgcctcagcctcacgatgcaacgtcgccaacatcggcaccattgccacctgctcctgttcaagttcctcctgggattccaacctggaaagtgtcagcagatcctcaactaattgagtcatacgctgcgactgcttacgcatctcatccaacattggagcagcatccggaaaatcatccggatcgagcatgtcaagataaccatgcaccacggtcagtggggtacgtaattcgtgcgacacattcgccacaaagtcacgtttcacctgctccagacgcaacagtttgctaacgtcacgtgctatcagcaacaaataatcgtcgaaataaggaatgaggtgcagattcaagcgcacgtcaggattcactggtgaagagacgtccaacatcgactcagcgttacaacgctgagtcaaccatgatgctaacggcaacggctgcaaccgctcgacaacaggcctgtccaggtcgctaggataacgcaggcccagcaaggtattcgccgcctcattgaaccattgaatgcactgactgttgcaatcgacaacaaccactgcatcagggagcgcagcagctgctgcgcggtaggtacgcaacatctccagcaaccggtgaacacgcgcacgcatgtcggtttgattacggcaaatcaagtgatctaattctttccaaacaccgatatccatcgaacgtgtccagcgccgacgcacggccaattgatgcagaacttgatacagcctccagtactgccaagcaatttctgctaaggctgttaaggtcagtactatccacacttggccgatcaaaagaccaacgagcagtgcagcgaacaaaatcagcgccaacacccccagggtcttgaaccaagcgaaccgaatacggtgaagtgtggagacaatactcacggcattcgatggaatattcagatctggatcgccccggagaagcgataaccggcactacgtaccgtctgcaccatatcgtcaaggccgtatggctccaacgttctacgcaaacggcggatatgcacatcaatcgtgcgctcctctatatatacgccgctaccccaaacatgatctaaaagttgagtacgcgagtacacgcgctccgaatgtgtcatgaaaaaatgcagtaagcggtattcagtcggaccaattggcacttgcacatgaccggcatacacacggtgcgcagcaccatcaatgcgtaatttgccaatggcaacactgccatcctcatcatcatcacgagtacggcgcatcaccgcgcggatgcgcgccaacagttcgcgtgccgagaacggcttgaccatataatcatccacccccgcttccaaaccaccaacccgatcattctcctcactacgcgcggtcagcatgatgataggtatttcacgggtcagcgacgctttacgccaacgacgtgtcaactccaggccactggtaccaggcagcatccaatccaacaaaatcaaatccggaacgcaatctgcgataacggcctgagcctcgcgcgcatcactggcctgcaaggattcaaattcacccttacgcaaagcgaaagcaaccatgtcacgaatcgctacctcatcatcgacaatcaagacgcgtttttgcacgctcagacaccgccttacttcggatgttcgccagtaaactacaaattcatgacaaaaatatggctgatatgacacacagagatcatcgatccaaatccggatcacggataccctgacgacgcatttccagcaccgctggagtaatcgccgcaatacgcgcatccactcgcgcacgtgtcacataatccagattcttcttcttcaacgcctgcaactgaatcaatgcctgctccggacgtccgttcagaaacgcagcttccgcataggcctcactggcgcgtgcagtggcaccggccaactcgcaggagcgcgcgaaggtttgttgaaataacgcatcctcagacaactgacgcagtaacggcaataacaacgcctgagcacgcttaccatcctgaaggttaccgccttcgttaagcatctccgcatacatgagcaccactgcacgctgcccaggcaagcgccgcaacaaggcatcgaaacgttcaccagcctcgtgacgctgtccagcccgcgcttgggtctgcgccaatgccgaagcaagccagacattgtcagggtgtacctcaagcaatgtacggaattcatgtatgacctcgtccagattgctgccattacggaacttggccaacgccatcccatagcgctgaaaatcattcaatcccccctttgtgttgcgacgcagggcttcatactcacgcagcgcactctctggggatttcgcactcagtacgcgtaagcgctctttggcccaaccgaactgaccactaggcccacgagataactcgctatacgctggctgtagaacttttggcaacaacggattagcaggaacaccaggcaaagcatgatgcaaattcaaacgctcccgggacattaggtcaacctcaccccccgtaagtcccttttgtttcttgagttgctcagcacgtgccttcgcctcgctgatgcgggttacggtcacaggatgggtctgtaaatagtccggcgcctggtcgccgccagaattaccgcgtgtcaccagcgacattctctcgaaaaagccagccatcgcctctaagtcatacccactacgcgccaaggtgtgaattccaagacgatcagcctcagcttcgttggaacgggtgtaattgatctggcgctgctgcatgagtcccatggcgctggtaataccagccatcgtcgcatcaccacttgaattaccaccaacgtgctgcgcggcgatcacagccgccagcatccctagcagaatcggaatctgatcacgctgtgcacgctcaacgctacgcagcacatgcttctgagtaatgtgcgcgatctcgtgggagagcaccgctgcaacctcatcctcactctcagcggtcagcaacaggccggaattcaccgccacataagcgcccaatgtggcaaacgcattaatttgacgttcttttaacaatacaaaggtaaatagttggtgcggttgatcactgttggccgccaaatgctctcctatactctgcaaccacccctgtagtaacgggtcttccaacacatagccgtagttacgcaactcagccatcatcaacttgccatattcggcctgacgtgccggagtcagtaattgccccgctgaggaaccaatgtcaggtaagcggctttcctgagcattgacaccaatgccccccagaggcaatacgagagcagtggcaatagcaagtgatagtcggcgcaaagtgaagctcctgtcacgaaattctggcgaggtcaccagtttaaatgttgcaaccgccaccttcgagatgcggggcatcggttaccattggacctcaaaatcgacacggagtttcctaatgaaacaagacgctacacgtgatgaagcaggtagcacacccaagattactatttactcaactgccatctgcccctattgcgtggctgctaagaattttctaaagagcaagggttacacctggacagagatcatgatcgacgtgaacgcagcagaacgcgaaaaaatgattgcacgtacccaacgtaccagcgtgccccagattttcgttggggatacccatgttggcggctacgacgacatgatggcacttcatcatgcaggcaagctagaaccactgctgaccaatcacagcccgcagggatgatcgcaatgggggagcgcaagcaacgcttccaccctcactttgaacgggatctaccagcatatgcacccacgcattcagtccagcaaaaccatacattccatctttaaacttcctcaaacttgccataccgatgcatcaaaaataaaaacatattcgctcccatattcgctgccaaccgtgatgtgagatgcttgatactacatcgcatcatctaccgcgttgtacagctccttatataaccaccaatataactccaacgccttctcgcacgatgccaacccagcctgcgcacgagttaaacggcactgagacagtgcaaccacagcccaggcgcgcttgcgcataaggtattgaaaacatctaacaacacataacaagcacaaacaggactgtcttatatgcagccctgcggcgctaacatccctctttataaacgtcacgcaccagaagacacaaaagacatcttcatgatggatgaacacagtgaatcaaggcaacgaacatcacaccaaacttctgtcagcaattttaaagatataacggaacgtcagatatagttaacgcctgaagtattatcccctgaggccatctataaacttcaggcataatacttggaaaaaccctggcatccgcactctggacagccagctggcgctcccctttttcagttcggaattcaactctcatgacgcaaacaattacggtgatccgcggtgatggtatcggcccggaaatcatggatgccaccctgttggtattaaacacgttacaagcgaatctgaattacgaattcgcagatgcaggcttgaacgcacttgaaaagcacggagacttgctaccagaggccaccctgaattcaatcagcaagaacaaagttgcgctgaaaagcccgctcacgaccccggtaggtgaaggcttcagctcgatcaatgtcgccctgcgacgtaaattcgacttatatgccaacgttcggcctgcaaaatccttcccaaataccaagtcacgctttagcgataacgtagacctgatcaccgtacgggaaaataccgagggcgcctacctgagcgaaggtcaaaccatctctcctgacggagaagttgccacttccagcgcacgagtgacccgtaaagggtcggaacgcatcgtccgttacgcgttcgacttggcccgaacaacgggccgcaaaaaggtcaccgcagtacacaaagccaacatcattaaatcaacctctgggctgtttctgaaaaccgcccgagacgtcgcaagccagtacccagaaatcgatttccaagaaatgatcgtcgacaacgcttgcatgcaacttgtgatgcgcccagaacaattcgacatcattgtcaccaccaacttgttcggtgacatcctctcagatttgtgcgcaggcttggtcggcggtttaggcttggctccgggcgccaacattggtaatgaacaagccatcttcgaagccgtacatggctcggctccagacatcgctggacaaggtaaagccaatccatgcgcgctgctgctaggtgctgtacaaatgctggatcatatcggtcaaccacaaaacgccgaacgcctacgcaacgcaatcgtggccacactgaatgccaaagactcgctgactcccgacctggggggtaacggcaacaccatggaattcgccaaggcaattgccagcagactctaaaataacacgttagtaaccacacatccagtaaaggagaaaaactgatccaatgggtagcaataccgcaacgttatttactgtcacacaaacggaccaatgccacgcagcactgctcataacgacagcctttcaatcctaagcggttgatgcacacacttatctaaatacgcatgggataggaacaaccgcgtcagttaaagtactcctggcgcccaatcatagccaggaagatgacactatgaagatccacgctgtaaagtacagcggcctgcaatccacatcagcaacataaagcaagacttcaaaatgcggcttcatttccaggcgcacgcaagctgtaacccgataagcgccaaatgttgtcttcgtcctgtcgaaacgaaattaactcacgcaacggctgcgacgcattcgcaaacttaaccgggaaactcacattgaagtaaaggccagcgggcagctgcaggctggtatcatatttgacccgagtcactacgccatgaccgcgcgcgatcactgtgccaagacgaacacgctcgacacgaatctgctcaataaacgcatcacgccttaccgcttgcttagccaccattgaggcaccatcccagatctgtgcaatctgaccagcatcaaccaattgcgcaacctttaacgctgcctgattcatcatcgcattctgcttatccaattgtgcttgctgggctggcgttagggggggcgcagtaacgattggcttcacctgaggctggacgtgaccgaccacgaccaaaggagtaacgaaaacaaacgaaagcacaaacagacgggcagaacgaaacattctccgaacacttgtaaaccgaacaagcctagcgaatttaagcagatttaatgcgggcataaccactcggagtggataaagaaagcgcctaccgcatacaccaacagcaatcaacgatacgcagcacaagctgggtcaacaataggacgcaacacaaggtttggaaagattcaacatcctaagcattgtatgttgaaatgcatttagaaatagtactgcaatgactcgtatcatttcggcgatctatcaactgaacagtagctcccaagaataccaagaccttaattcaatacctgattcccaagatgcaaggctttcacattaattaatgatgtgcctgcatgattggttgaacgagatcagaaatccctatttacaatgacgcacccgcagaatctacctaagaacgttccgcatcgcatttaacatatcctcagttcatctaaataactacaaatattcagtgaataactctgatggaaatgcaagcaagcttgtcatcatgggacagagaagacacgatgcagtgtatgggctaaatgcttctcttacgcttcaggaaaatcgacacatcatgccccttgaaatccacactgcactacgcagataccaagatataaatcaagcattccaggcagtacttgtgtttctatacatggacacctaaccgcacgtaccatcacacgtcctggaacttgatggccgtagaagatttttatattgctaaatcgatactacctagccgtgaccctaaagaggcctcatgatgtccccactgtgctatgacatctttgatagtccgattggaatactgacggttgtcgccgatacagatgcactatgtcgcgtgatgctcccaagcaacgatcacacaacacaagagcacaaatgctggcactatgctccgagtacaacgctattaaagcaagcacgcacccagttactcgactatttgcacgccgagctccacacattctcgctaccgttacgaccacagggcacaccattccaatgtgcggtatggcatgcactggcccacatctcattcggccagacttggagttatgcgcaattagctgctcacattgggcgaccaagtgcaagccgtgccgtaggggccgcaaacgctcgcaacccactgcccatcgtattaccttgccaccgtgtgattggcagcaatggcgcactcaccggcttcaacggcggactacatatcaaacgctccctgctgtacctggaaggtatcaaaccaactcatacgtgcaaggcaatcatgacatcttgacatcactactactgctgatattgctgcaatgatgatcgcacgcccgttatctatattcatcggcaccctgctattggcggcctgctcgattcctactcggcttaacataccaaccattgccatcacagcccacccaaagtacaaattactgctgatcttgattgatggcctgcgcgctgacgcgcttgaacatggtcaggcgccgcaactagcacgcttagcaagcgatggcgtacacgcactctggatgacaccttcgtatcctgcgttgacccttccaaacgcctacactctaatcactgggctgcgcccggatcatcatggcattgtgcataacaccatggaggatccgctcctgggcgcattcgaatcggagaatcaggaagcgatcagcgacggacgctggtggggaggtgaacccatatgggtcagtgctgagcacgccggcatacacagcgctacatttctctggccaggtagcgaagcatcaatcgccggtacgcgaccaagccgctggtatgcctataacaaacacatctcagcagatacacagatcactcaggcgctgcgctggctcaatgaacgtggccccgatgcaccacgcttggtgatactgcgttttgagcaagtcaacaccgcaggcaacagtttcggccccgattctccacaatatgccgcagctgtacacatgatcgacagcgcaattggtcggctgatcgatagcctgcgccaacacggcaaactcacagataccgacgtgattgtggtctctgaccaaggcattgcaccaatcccaggcgatcatgcggtacctctagaacgcatcgtgcaactatcagatgtacatgtagtcagtgatggccaagtgctcggaatcacaccgctacctggccatgaaagtaaagttgaagccatgctactcggcgcacacgccacatatgactgttggcgcaagcaagccttgccaacgcgctggcactacggtacccacccacggatcccaaacatcgtctgccaaatgcacgaaggctggaatgcactatcagcagcccaaatcactaagcgccacccattgcaaatgggtggctcgtccggtttcgatccaatgctcccctccatgcgggccattttccttgccaacggcccatcattcatgccgaacctgttacttaacccgatcaacaacgtcgacgtatacccactactgacacgcctactcggcattgcgatggcacctaacgatggaaatccacgtgcactgctgcaagctttacgcagcagcaatacagcaaacggctacacgtacagcaaacgcgatgcactacattgattcattcacgatcaaagtaccaatacagtctttcgcttctccattaacacgggtgagcaacgcaacctgtctcagcatttttgctgcatccatctaaccaatcctatatccccaatataatttggggctagaaacatcaaaaaggaattgagtacagccctctcactggatgcgtggtatcgacacccttcacaaatcgtatccttaacgccaatagcctttttatcgctcttcatcacaccagatttacaccacgcaatgcagggaaaatcaaattcaaaagtgaccaagaacaatacacttggattgcgtttaacaacgccaatgtgcacttaccaaaaggaaaggcgatgcactgtaaaagtacctttcaagtacgccgcaagtagcaagcagctgcgttgcacatcaacaacccgacgagatgtgtaactgtagcgaatgtttagcacgcacatgtaatgtacaaaacccgttagggaagcttgtcgggcaaccactcgtggactcagataactgatctagaattgcacgcctaaacactggatttaatcatgccatttgtcgttaccgaaaactgcatcaactgcaaatacactgactgcgtagaagtctgtccagtcgattgcttccatgaaggcccgaactttcttgtcatcgaccctgacgaatgtattgattgcacactgtgtgaaccagagtgcccggcaaatgcaatctatcccgaggaggatgtgcccactgagcagaaacaatgcattgcacttaacgccgagcttgccaaagcatggccagtagtgacggtacgccgggaaccgatgcccgacgccgcagaatgggatggcaaaccggataagctagcgttgctgcaacgctgaagatgcttattctcccccgatcaaaaacaaaactttatttacccgttacctgataccactctcctgctcctgcaattccttcttgaacgggatgtccggcggcggacgtgcaatcgctggctgatcattcatattgggattcgtcagactgcatcccccgccaaactgcagcagtgacaccacacaatggatcttgatgtgggtgcctggaatggggatttcgatcttcttgataccacgactcacccattgctgtaataaagattcatttggggtccagtactgatcgaacaccgttggaatgtaatcgtacggtggccgtttcagccattgcccagactgagcaagacgttcacgagtccaagtatctgattcactcccaggtgcgccgcgcgaaatcacgccggacgtgtcggctttaggggcacgaacacgcccctgctggtcgaacaaaccttgcccatcactcccctgacgctggtgatcacccaacccccaatcatcgttacgcttggatgcatccgaaccattgccgtgctgcactgcacctgtattcccttgcttccgatctcctgaaggcgtttgtactggggtggatgcaaccgtcactggagctgacgaaagcatgtcaacagaaggttgcgccggtacagcgacggcgggcaactcacgctgatgaacctgtacttcacgcagttctttgggacgaagcgtcggaacaaccaactgtggactgctcataacaagctgccgttgatccggaatcacaacatcacgctcacgcacgctcggaataggcacacgcgacggaggtagctgcggctcgtgtgactgtaactgcaacggtcgcgaagaaatatcaacgatctgcacctcacgttgccgcacttgcggcagcaaatgctcacgtatccggaccggcatatcagataaatgctgtaaaggaggaatcacaaagtcagttgtcgggactgtcacttcagtcacttgcaacggctgttcaactgtaggttgcgctggctgtttgacctcaacgttagaaggtacctgacgcgtagacgatggtgacgcagcgctcccatcagcaatctgtgtagatggacttcccacgccagtcaaaggggcaggcacaggaggaatgacagacggtgtagatctggacacagcagcagacgtcgcaacagcaaccgctgcatcatgtggtgtgcccacctccgtaccagatgccgatgcaccatgaccaatcagactgacgctcacccgactctcatcacttgaaggcggcaggacccaacggatcgcaaaactccaaataagcaaaaaaagaaaacacaaattaattagggcactgctaaacaccgcaacccaatgcagtagccactcatcacgcggacgtggatcccagtgttgccaccacaagcttcgaaacgcccgaaagtatcctaacgccagctcgtctctgctgcgaggacgtgacgtatacgccgcccaaaaggcaatcaacttgctctgcctaaaccttggagactgcaacggcattcaatccatccacatggcaagcggctaatcgacctgaggattaacaagtccggaaaataagtgtgcatcaagacaaaaaatgcgtgaattgagcatgtgtcatcgcaaagaaaaaatcaggaggcaaaattgcgagaaatgtatggagccgcacctgtgctgtggtcggtcgcatcacgcactgcaatcacaccatgtactcgctccatcagggttttctcaacgccttgcttaagagtcacatcaaccatgccacaaccgtggcagccaccgccaaaacgcagtaagacaactccttctgcagaaacctcctgtacctccactcgtccaccatgggatgctaattgcgggttaatctcgttctccacaacccaacacactctctcaaccaatgatgcaacctgactaagctcctgacctttaatcttcggggctttgatgatcaattgctgactaccagtcgcctgtgtaacgtagtcgatctcagcactatccaaccatgccacgctggctgaagcgacatagagggtgaagtcaccacagtctatcaaccattcatcgccaaccaattccgaaggctcggcaaactccaagcgtgcgtcggcacgcgcggtgccaggatccaccgcactcaaacgcacccccataccaggaacaccctcacgttggatcaatctaagaaagtgggccttggccctgtcagaaatctggatcatgtggattattctaacttcacttagtatcgcattcgcctcaccctagtatgcacatactaatgacaccagcatgtgcaccaggatgctcaatgaacgatctgattactctagctcaagctcactgccagccgcgagaaaaaaaagaacacaaactcggccaagcccgcttagccgaactgttgccacaagtcccagggtgggaattgagtaataacggacatgcactcacccggacattccgattcgacaattattaccgtaccctcgcattcgttaacgcgctcgcttttatcgcacactgcgaagatcatcacccggacatgagcgtgcactatggccgggccgtcgtgtgcttttcaacgcataaaatagggggaatcagcgagaatgacttcatttgcgccgctaagacgtccgccctatacgaacaaggaatctgacatcgccatgaaattgctgcattttgctgccctggcggcactattgctggcgcttgatgcctgtaacaagcgtgtcgatcaaacgcccgtaccccctcctactgaactccttgctgtgcgtacgcccccccccaagtatccggagcaactagcctgcgccggtatcggcggacgcgcagtattgaaagtcaaagtaggtccgcaaggaaaacccatcgaagtaaacttggtacaaagcagcaaccaggtagcactggatacagcggcggaggatcgtgtacgcgactgggaattcaggccagcgacgcgcaatggtcaaccgatcgcacagacaatccaagtaccggtcacgttcaacccacccattcccaaacctgactggtgcttcgcacttgaagaaggtgaccatcacaatcactgaagtcactatgcacacgggcatcacagcagcgttctaatcgcatctccatatctatctgcgcctgatacacatgacctgatatctatatcaaatggccgtttagaatttcacgcatatctaacataatcaaagcacttatagtgccagccgctccgcaatatttgttgcaccccgcaattcagcgggtggggatgattctatatcgacaaggcaattagtatcaccgtaagcagattcttcatatgcgctggaaaattccagactagatatgctgttaacgcttaacgatcacagcccacaacatctctcacagcaccgtaatcgcagtgctggagtatttcgccacacgcataatgcgtgcagcgagaggctgaacattttttgttaaagatcgctcaaagctggatcagactaaagacggtctaaggcggccaccaagtcctccgccaatggagcattcaacacatagggcgtacttccagcatccaaagcaaactccaacgacacagcatgtaagaaaagacgctgtaaaccaatctgatcgcgcaaccgccggttgacctcctgatcaccgtatttgtcatccccagtgactggatgaccgagatgctgtgcatgcacacgaatctgatgagttcgaccggtttcgatcaacacctcgcaatacgattgccctccacgccgctctagcaaacggaaacgactctttgaaggcttcccatcatgatgcacccggacatgacgctctcccccctggcgcaaattaatatgcaacggcgcatcaacactcatcactccattgggcatacgcccggataacagagtcaaatagcgcttggcgataccacgcccctccttaccattcacgctggcttcacgcatcaatgcctgcaactcaatgagagctgcacgcttttttgccatgatcaacaaaccagaggtatcacgatccaaacgatgcacaagttccagttcctgcttaggacgcaagatacgcatagcctcaatcacgccgtaactgatcccactgccgccatggctagccataccactgggtttgttcaacgccaacaaacgcgcgtcctcgaacacaatcgccgcctccatcctggccagaaatgcagccgatggcgcgacaatggcccgatcctgaataagacgtagcggcggaagtcggatttcgtcccccccatccaatttgcgctcggccttgacacgaccaccattcactctcacttgcccactgcgcaccagcttgtaaatcaagctgcgcgggacaccctttagtttgctgagaagaaaattatccaagcgctgcccactgtgctcggcaggcacgacaacgatacgtacgctgaaacactccacgacagactctgactgggaacgaaatggatcggtcatccgaccacatattctgctacacttcgacgggcgagataagggtttgatttcgttgaaggttgacctgggtcagaagccccgcttccgacgaatctggcatagcacacggcccccccatcagggacggcaatgttagcgactcgccgacctacctggccatcgccgggcatttcagtgcccgcgctgaacatgtcccgtgcgcctcaccggttttaccggaatgtggctgtcggccctgaaacaactgagaaataaagcgctcccgcggcctgccgtggtgctgtagcgctggaaaaccaaatcgacctgtacgcgcttcgcgcgaaaggggcggtgaatacttccagaggcgaagcgccacggcgttccgcgcgtaaaaagcgcgcgaggaacgcaactaatgaagcgaatgttaatcaatgctacacaggccgaagagcttcgcgtagcaatcgtggatggccagagcctgtacgacatcgatattgagcaaccatctaaagaacaaaaaaaatccaacatctataaaggccgtatcacccggctggaaccgtctctcgaagccgcatttgttgattacggcacagatcgccacggcttcttgccgttaaaagaaatctccaaagactacttccaagccggtctggaccatcacaaagctggtatccgcgagttattacgcgagggtcaagagatcgtcgttcaggttgataaagaagaacgtggcaacaaaggagccgccctgaccacgttcatttcactggccggtcgctacatggtgttgatgccaaactcgccatcagcaggcggagtctcacgtcgcattgaaggcgaagatcgcgctgcgctgaaagaagcactggaaaaactgaacattcccaacgatatgggagtgatcatccgcactgctggcgtgggccgtgacactcaagagctacaatgggatctggattttttgctgcacgcttggcgcgccattgccgaagctgcattgagcaagcctgctccattgctcatctaccaagaatcacgcctcatcatccgcgccctacgcgactatttccgtgctgacatcggcgaaattttagtcgatacagaggaaatgtatcaggacgcccacgaattcatgcggcacgtgatgccacaaagccttcgcaagctcaaatactacaaagacgacatccctctgttcaatcgcttccagatcgaatcgcagatcgaaggtgcctacgaacgtaacgtacgcctcccctccggcggctccattgtggttgatcaaacagaagcgctcactgccattgatgtcaactcttcacgagctacaaagggtaacgacattgaggaaaccgcattccaaaccaacctggaagcagccgatgaaatcgcacgccaactgcgcctacgcgatgtaggtgggttagtagtgattgacttcattgatatgtcctcttcaaaacaccaacgtgagatcgaaacccgtctacaaaactgtctcaaatacgaccgtgcacgcgtgcagcttagccgcatctcacgcttcggcctgttggagatgagtcgtcaacgcctacgcccaagcctgggtgaatccagccaaatcgtttgcccatactgcgacggacacgggcggatgcgcagcatcgaatcgctatcactatcgatcatccgtattgtcgaagaacacgcgatgaaggaaaacactggacaggtgcttgtccagacaccagtagagatcgccaactacctgctcaacgagaagcgccgtgcaattaatgagatcgagaaacgccatgacgcaccgatcatcatcattgctgacgagcaattacataccccgcactacgaggtgactcgtctacgtgagaacgaattaagcgaggaaacaggcaaaccaagttaccaacgcaacaccccacgcaagctaccggtacatgcactcaccaaatcgcaacttaacatcccgccagcaccagcagtgaaatcgatccccccaccgcaactggcaccaactcaagaaaacataccaacaatccgagagcaatccgctgagaaccgagcacaccctattccggaacttgtatccagcctagcgagttggctaaaacgtatctttggaaatactgacaagcgacagaccgcaagtaacagctcgcatcctgcccccctgcaacagaaccgcaatggcaatgtgcaacgcaacgaacgcaaccaccgtgatggccgaatcgctactagcaacacccaaccacagcagcaaagcagcaaccaccgcgacaattatcgccataacgaaagcaacaactatccgcaaatccagaaccaatccacagcagacacaaacgggaaattgcggaacgaatcacaaacacccaaatcgtcagcatatgtgtcgaaacaaccccagatgccaaggcaaccccaaccacagctcccaaaaacaccaaggacacaatcgcaaccgacacaaaacagcacgaaaacgacattagacaaacagcctgcacctgtactctatggtgaagacaacacgctacagaaagcaaaaccgatcccgttaactgcggaagcggtgcttactaacatgccggcacctagcatgacagccacaccgtcaggtaaagaccagaatgctttaccaaccacatcgaacgtgactcaagacacatcaaacgcgctgatcgaagcccaatcaaccacaaagacgaacatcgatacgaatactgacattgaaccgcaacaaaacaatcatgaaggtactgcgaacaacgacggcagcaaccggcgccgccgtggtcgtcgtggtggtcgtcgtcgtcgtcggaatacttctctcggtaacgaaaccaatgctgtaagcgaaagcaatagcatcaaactatccaacgacactgaaaccgacaatgcggacaatatcgaagcaccccaagccttgcgccctgccatgcaggaaaacaagcgccaaccggagtttgagttcgatgacctagcacccgcagctccgatcaccgcaccattacgtaaggcaatagctgctgagagagaggagatatccgctgatctcacaactacagcccctcagagcatgatggaaaccacgtcccgaacgcatgtcgcctcacaaatggctccccaaagtgaaaccagtgctgcgtcaaccacgtctcatacctctgtacaagctactacgacgcatacgcataaagatgtcgtttctgattccccgtcaagaacaccttacaaggctcactccaacaccaccagacacacttcggggcgtcgtctggaaactctctctacggcacatacccctgccaaggcatctccatcagagcatataacaccaacatcacgctcaaacgcgaatgctaaaaccacaaagacagagataccaaacaaaccaaccaacgcgaacagcgatacggcagctcgcccaacagccactgatgtgctggttgtaacgaatcaaccagtgatggcaaccaagccttcaacaacgatagaaaaagcacaaaccaaagtcgttccctccactacatacaataatgaacacatcgaaacgaagcgaaagatcattgcaacggaatccgaaacaacccaaccaccagtacgaaagccacgcttgccgatgcaaaatccactacccaaggtagtcgctccactagaagacaagaagcaagccccattcgtggaaaatacaacccaacgtaatattaataacgcgaccacaacatcgcagaacgacaaattattagattttacaaaaaacaacgaaaaaaatagtgacaacaatacactatgaaattactaacacccttgcttccaaacacactcacataaccaatgaaataatccctcgcttccgcaaataggtcgaaagcctagttctgtactctttgccatcgcaagatgacaaagagcagacttagatcatttccaggaacaaaaaccatacactcaatgcctgacacttgagatgcttacataaacattttttacagttgtagcccgccccataagtagaaaatacaaagacacaacggcgactaaaaggctttaaagaacaacgacgcttgagtggaaccacatggcggcactaccaaatacaatactcttatccctgataattgtagtgaggtagcaccttatatcatcctattgagtgccttctcagtacctgttcactctctacctgaaagcatcattttgcggaagaaaatctggatttcgaatcagatcgttttatctaaactatatttctccggagtactcaccccgtactgaatagccaaccgagccagagcaatagtatctcgaacatccactttagcgaacaaacgcactttatgagtgttgattgtcttaggactgagacacaatcgcttagcaatagccccctgactcagaccttggattaacaacaaggcaatttccaactcacgcggcgacaaaacatcaaaaggtgaacatcctccttcaaggcttgacaacaccaaattctgcgcaatgctgttaccaagatagcgcttacctaaagccacttcacggatagcacgcagcaactcattagcatcaccgcccttaccaacatagccagaagctccagcctctaacagtcgcttcggcaatgggccgtcctccaacaccgaaacaataattacacggctaccataattccctttcaccaatttttctgtaatctccagcccactcaccccagggagatgcatgtcacacaatacgacattcgggcgtagctcacggatctgtggtaaagccgcctcccctgtctccgcttcccctatcacttcgagatctaattcattggataagatcatcttcatgccaacacgcacgagagtatgatcatcaatcagaaaaatcttaatagtcatccttgtccccctgaatcagatagttttctagagatgcgagtcaatccaacgaatttctgaaaccaaacatattgcggtaaatacgcatattaatgcatcggaacaccgcacaacggtttttgaatatcgactgaacagactgttatgcaacctctccccaataaagcccgcaacaactgttacgcaaactagcaactcaggatgcaacgaccgccggggagcatgtatcagtagatactgcgccacgcattaagaaatttctgatcgcgcaaaacttgctacgacccgcatgtcattcaaaggacgcagttgcggatcaagcgctacccgcttatcaaagacaaaacaacgtccatcgtagccctcaccccccacttgctcgaagtaaccgaggataccgccctccagttgcagcacgttgtccataccatcaacacgcatccacaagacagccttttcacagcgaatcccgcctgtgcagaagctaaccacagtagcatcggataataagtcacgatagtgtgctagcgcccctgggaatccagtaaatttggtgatcggcaaggtcattgctccagaaaatgtaccgtatgcaatttcttgctgattgcgagcatctagcattaccaaacgtcgaccattatcatcgcaaccccgacgtagccaatcacgaagggtgtgcgcagagaccccaggtgcacggccctgaagcggagagatatccccgcgacggaagctgataatctctggcctgaccttcaccttaaagcgcgcgaatggtttatatgcgctaacactatacttcacatgcaacgctgcaaaacgcacgtcagcacacaaccaagcatagaatgcattgatagcctccttctcgccagcaaggaacaaattaattccttcattggcgatcaacaccgtccctttcagtcccgcaatctccccatgggcacggatttgatcagccagtgtctgcggctgcgtgatcgaaacaaagtgataagcagcagtattgataataaccatcgtgcgattgtaactcagcacccgcatcaggctcacagactcattgtagaaatgcacttgtgaatgatcgccaacatctataacacctggcgatggaacaaacaatctgccatccagcacatgcaatccgcgcgcgctcgacagagacgaacacgtaattaaacgctctaaccaacaatcgtattagatacctcagaagatgacccaactaaaacactgagaacgccaccggaacttgatggtactgaaaaaattgggcctgtgtttccacactccaaattaaatgatgttctaacacaacgactaccagtgaactatctacgtggcaaacctacgtaacccggcaatcagtgatatagcatttattgttgacacaattgcagcataagcaatgcaggatacaaacaccatcaacttaataagcaatgtagcctaacaatacctaccacactgtattcactagaatacataatgagaactcacttatatctgagcgactcatcaataatccatatgacgtcattagagttgatattgacgtaaattcaacaaaaaccaatccataatgagaatgtgcgacgatcaggtaccgatgcaaggcagcatgtcttggcaagactctgatgtacactgaatcttgatacttcagccaatgtcaccgcgcaccgcatcactacatggattttctgtcgctatactccatacctagtcggggaggatgcgatgttcactttacagagaattcgaatattagtagtagaaaacgatgcaataaacacgatactacttgaaatgcaactctctcaagctggcgcatcagtgatcgactctacagcattgatcgaagatgccattgcgctgattaaccaacaacctccagatattgcaatccttgaccacaaactcggtaatggcaggaccagtggcatcatcgccaagcgtctcagtgaactagatataccattcgttctagccactggaactcctccagaatacatatctagtgagttcgcctcaggtgtaatactaactaagccatatctgactaaggaactgatacacgctttggaaaaagcttacgagagaactccctctataggcatcgtacccgagtctgattaatgagatatagtggaatttaaaattaaacaatcgaaaatatttaaataaattcaatgatgcatcagaaagaaaaagatccctaaagatcttaagcacactggatttatatttccgattatttacccaaagaattagaaataacaatgatgaatttcacacatcttcataaagaacattaaaactagtgttgacataagataaaaaacaaagatcgtcattataattttcgcactccattacattaaaagaatccacctattttcagatcacattagaaaatcttcaaggttatcaaggaaataaatgcgtctattgcatctcgcaaataatacgagaaactcaagatataaacgatgctccaggaaagcaagagatcaaactaatgaaaaaaactcgccgccaattcatcatcaaactcaactgaatccatagccatatcttgtacacagtgaggcgaacatggaatcactgttaacaagcttgtcatcatgcatggaaacacgataaatacgctggataccgttaaacaaatacgcaccccaatgagggatacagcatcctcatcgctaccgacaatgctacgacctagggttcgagcgcaacagaaaatatccttagcaactactgattgaaaagcctccacaaaagaaaaagcactggtgacacaagcaattcagaaagcatgtaaatactgaaaaacaatccttcagtacatacaccacacaagcaagaaatgccgccatacgcactgaccaactgcaactgacacaccttagcaatcagagatcattagccaaccacaactggctagaatgatcgtgtacaaccgatacagccatgcaaattagtaacatcacgctgagagaggctccctgtttttagtacccttaccgcgcacgcaaacattcgacaccattaaaaataaaatagcaatgcaatcacgtgatgataaaagcagcaacgttcatatcccatagcgacatgaaaagagccggaaacgcacgctcccggctcctgcgaaaaccccaaaactctctttggaatggatcagctcatcgcagccacatagcgtcgctcaacctcatcccagttgatcacgttgtagaacgcattaacgtaatccgcacgacgattctgatagtgcaagtaatatgcatgttcccacacatccaagcacaaaataggcgtcttaccatcgcatagagggctgtcctgattagcgctgctttcaaccaccaaagttttgctcggagtgacgtttagcaatgaccaaccggagccgaaacgactgagtgcagctttggtaaaagcatctttaaatgtctcaaaaccacccagctgctggtcaatcgctttagcaacctctcctttcggcttgccgccgccaccctgagccatcaccgtccagaacagtgaatgattgacacaaccaccgccgttgttacgtactggcccctgcaagctttccggcaaacttttcaagttacggagcaattcttcaatgggcaaatccgcgtactccgttccttccaacgcagcattaagattattgatataggtggcatggtgcttggtgtaatggatttccattgtctgcgcatcaatgtgcggttgcaacgcatcgtaagcgtaaggcaggatgggaagggtgtaagccatgcgtttctcctgaagtcatatcggcggatgccgacgtttatggtaaatggtaaagacgataggcacagctaccaaggaaaatgatagggagaccacaccccattaaaacccatcagcatgctgatgggtgtcctttagatagactagacgctggcactaagtgctacttttgacgccaatagcgaagttaaaaacaaccaatccaaacatactcgccactcttcctctccgattcggacatatgcttagaaaattcacgctatcggccaccgttttactagtgctcgccacgttgtggggcatgcacgcattgcatgtttctaatccggaatccgcaccaggaccgcaaaaccatcacggcggagtacagatcgcaccaccagcattacgcgccaaagatgggttaccggaatttctccccgcagaagcgcgtaccttggtcaggctcattcaacaaggaggccctttcccttatcgtaaggatggcatcatctttggcaacagagaaaaacggctaccagcacgtccatacggttattaccgcgaatacaccgtagaaacaccaggttctcacgatcgtggtgcccgacggatcgttaccggtggtgatcccccagagatctggtactacagtgataatcactacacgagcttccgcagcttcaacgtatcaacgcgatgaatagcaacaccctccgattagatcccactgacccaagaagctccagggtctatcgggttgcctccagcgatctgcctcacttggccgcagtgacccatgcagccggacttcaagttatccacgtgaacctgcaccagtgccgcgacaaagccacgttgctcctggagttagcaacccaactgaattttcccaagagctttgggcacaactgggacgcactcgcagacgcactgcgggatctcagctggctggcggcgtctggcgggcaagtactgttactaaacggcatcgccacactggcacaacaggcagccgatacacacgcaatcctcctagatatccttgaggaggcaaccgcatcttgggccaatgatagccgggtgtttatggtctttgtggccgacaccgactaaggcaagcagccggtacaccaggcggggtaatgcctgccaatacggtatgttttttcaacgatccagttcagcccaacggacgtaagcagcatccagttcggcctggagcatagtcaaacgctgtgtatcagcacccactaaagcgctatcgcgctgataaaaatcagctacgctcatcgcctcagtcaacgctgccaactcttcttccaaatgctcaatgcgattaggtaattgttccaactcacgcatgtccttgtaactgagcttacgcttgaccgcctcggacacaggcatcaccacttccgctttggcagcatgtggctcgcgcaccgtcaccacagtaggctggggacgctgccacagccaatcactgtaaccacccacgtattcaccaacgcttccttctgcttccatcaccaacgttgatgtcacaacattgtcgaggaaatcgcgatcatgactgaccaacagcagcgtgcccttgtaattggtcaacaattcctccagcaactccagcgtctcaacatccagatcattagtcggctcgtccatcaccaaaacattggacggctgtgcgaacaacttcgccagtagtaaccgattacgctcaccaccagacaaacgagtgatgggtgcccgagcacgttcaggagtgaacaaaaagtcctgcaaataagcgtagagatgttttcgcttgccattgagatcaataaagtctgcaccttcagcaacgttctcaattgcattccagtcctcacgcaaagtcgcacgatattggtcaaagtaagcaatctgtagatgagtgcccatacgcacctcaccagcctgcggtagcagctcacccaacaacaacttcagcaacgtcgtcttgccactgccattggggccaatcaatccgatacggtcaccacgcaagattgtggtggagacatcacgcacaatcgtgcgctgaccgaatgcaaaacacagattctttgcctcaatgaccttcttcccagagaactcgccttgagccacctcaagttgtacattgccacttagctcacggcgctgaagacgctccatccgcatcgccttgagcctgcgcacacgaccctcatcacgagtacgacgcgccttgatcccttgccggatccacacctcttcctgagccaacaatttatcgaagcgtgcctgctgctgtgcttctaggttgagccgctcctcacggcgacgctcataattatcccaatttcccggccaactcgtgacatgaccacggtcgatctcaacaatgcgcgtcgccaaagcacgtaggaaacggcgatcatgggtgataaatagcacgctaccattccaccccttgaggaaactctcaagccaatcaatcgcctcggtgtccaagtggttggttggctcatccaggagtaacaaatgaggcaaagacacaagcgcagatgccagtaacacacggcgtttcatcccaccagacagagacgcaaactcagcttcgccgtttaactcgagacgggttagtacctcagtcactcgctgatccagagaccaagcatcgctggcatcaatcctagattggacttgtgctaatgcctcagtgtcgagaacttccgcatgactgagttggtgaaattcagcgagccatcgcccaggctgaccaaggccggcagcaaccacatcgaacacgctaccgctcatgtcctgcggcacctcttgctcaagacgcgtcacccgcatgccctgctgaatacgaatttcgccactgtccggatgcaactctccagtaatcaatctcatcagtgttgacttacctgcaccgttacgaccgatgagagcaatgcgctcaccttgttcaatactcagcgctgctttttccaacaacaatggaccaccaacgctgtaatcaacattttgaagagtaatcagaggcattggcgcattgtacgcagcagcaagtcgttgcgttctggaggaagacacaacgacaccccaaaagcagcttgcacagcaatcaagcaactcaatacaacccactccaccatacaattgccgagaccaatcccactttcatcaagtacaacaccctagtttttcagggattgggactcacagtgcatcagcactctggaacaccacaaccaatgcaagatttgaattcactcctgacacagccacacactgtgtgaatcaaacacctggcactgtctccactcaagaactgcaagacagcatcgaacaaccaatgcggctgcgcgcccactctggacgccgcatcgcatacgcctcacgtcctagctgaaaatcatagggtcggcgcatgacctccaacagtgcatgtaactcaatgagatcgccttgctcagcacattcgatcgcctgctgcgtcaaataattgcgcaacacatagcgtggattagccaaacgcatgcgctcatgccgttcggcaaccggcaagggatccacagaaagacgggctgcatagcgctgcaaccaatcacgcaacatgggtgcctgcgcatcacgtttgacaggatcgtaaaatgcctcggcccacagcgacagactgtccggcatgttcggctcccaatcagccaatcccaggaaagtcagcgtcatatccatctccgcttgatgcatgcaggtacgcaatgcatcaaacaactccaggtcttcatcaaagcaagccgcgaagccgagtttagccgcagcatcacggcgctcggccgctaagtacgtggcacggaaccgttctagtcctgcctgcaatgacgctgcgtcactaaacagtggcgccagagcacgcgccaaacaacctaggttccaatacgccacctgcggctgagcaccaaaacgataacggcgactctgggcatccgtcacatttggagtccagtccagatcattattatcaatccagccgtatgggccgtagtcgatcgtcaaaccaagaatcgacatgttgtcggtattcatcaccccatgtacaaaaccaacccgcatccagtgggcaacaagctccgcggtacgtgtacaaatctcagcaaaccaatccacgtacaacgtctcccctgcaccgtgcaaatgggggtaatcccgcatgatcgtaaactcgaccagcctacgtagcagatcgatatcaccacgcgaagccggcaactcaaatgtgccaaaacgtacaaaagagggcgctacgcggcacacaatcgcactaggctcaggggcagggtgaccgtcataaagcatgtcgcgtatcaccgtatcccctgtggcaatcagactcaacgcacgcgtggttggtatcccaagatgatgcatcgcctcactacacaagaactcacggatcgacgatctcaataccgcacggccatcagcaccacgcgaatacggcgtaggtccagcccccttaagctgcaactcgtagtacacgccatcggcaccaagcaattcgcctaacgtaatcacacgaccatcaccgagctgccctacccattgcccaaactgatgtccaccataattgacagcatacggctgcatacctggatataacgcattgccgctaaacacctcgacgaaacgtggagtcaccagttcctctgcatcgaaattcaatatcgctgccacttcagatgaatacgccagcaaacacggcacaggcaccggggtcggtgccacccctgaccaagcttctaaaacctgacgcgagcgtaagctgacctctggatcgcaaggcagtacagcaataaaacggttgttaaaacgcagtggccacatatgaatcagatacgtcattggtgctgaataccttgtgatattgccgcatcccaattagcgaaggttgcgcatattccacacaacctaccctcagaatcgcctctatcactacgtagtaatcacgccagcaccacttaacaacagactggatcgaacaccaatatgaccaagcctgccaatcccgcaaaaacacaacaacggtttggccccaaccccttgaagaaagagattaaacgcaatagaaaacctgattttcctctagaaccacatcacagaataggaaattaagaatcctcaggagatatgagccataagaaattcttatctatggaaaacacgcaaaaaaacgccggaagcaggtacttccggcgttacgagaacgatctctaatgagaccctagattacagaacctgaacttggtcagcctgcatacctttctggccttgcacagcaacgaaagaaactttctgaccttcctgaagggacttaaatccattaccttgaattgcgcggtaatggacgaacaggtcgggcccattattcgaggtgatgaagccgaagcccttattatcattgaaccacttcaccgtacctatctgacgatcatcagacgtatcagacattacaaactcctgaacaattgaatggataacggccaccggagatcggggccaaaactgagttgcaggcgttggtcaaacggaacgatgaagctgatcaggtgatcgactgcaacaggccacgattcactgtgagcctagcaaacacagcacctgtaacgatactaggcttttcttaaaaaatcgactcccctctatctaattatccctacatccagtctactgattgagaaatgactcgcacaatatatgcgtctcatctcccctcccatccatggctctcaccatcgctaccacataagagcactctgtagagcaaagccacataaaattaaagccacaatacttgccttagacaggcccttccgcaatcagtgtagatggcataaataaacattgatgctgcacacccaagacttccgcttgttggcacaatcagcatttgaattgacactataacttcatcgaaaggcatcgctgcgatgactcaaacaaccaaagcaaatcagtgaattaagttagacaaggtcctgttgcaccaggggccactatcttaatagagaaaaaaccacggccagacctgtacaccaagatagccccaccgagcagcctcactaaacacaacatccagcgaaacatactgatccaatagagcttaagatcaattccaagcagtaagcacaggaactcgaatcacactatcgtcacatcataattacgaaacaccgaaatgatgaccaaggcaattgagatgcgctacacgcatgataatcatctctatgactagccaacacggagatggatacaattctgattttgatctattcatctagaagaaacaagattctcaaaaaaattttgacttccaacaacaatcagccagctttactagaaaatgaatgagattactgatagtaattacttatttactcatatttccaaaatcaaccgcaggaagaagaattattatttatagaatatttttgagacgaatatataaaaattttgactattatcactaatctgaatagtaactgggaatcaattctaaatatttggttctcagtgaatatatagcaacggtctatgtctaaaacctattcctcgagaaaaacatggccacactggctaaataacgcaaaccaagacatgcagcatggctagccccccctcttagacttgacgcaacatcgtttaagagatctgactgctggataaaccaatacgccaactagataaataccaactacattccatagccaaatttttggcaacctagttaggaattgataacacaaccaaaaacaaaaacaccgacgacatcaatttaagcattaaagaactgctacacctgatacctgagtcgtacttcgttcagtcaggtgtagacgtatttagctgacctaggaacttcacaatccatatctgcattcctccatcaaaaggataaagcacctaagcggccatgcagtgcatgcctagattgctcgtgtcccctctcatcccttggactaacgcatgaaaaaaaacaaagaacgcacactaagactgatgatcattgacgataacgctgagaataccgaagcgatcgttactttgctgcgaaatagcggccttgcagtgcggccatcccggccacagcacctagaagacgtgacaatgatgctcagtcacccaattgacctagtactagtcggtaattcctcccaaatatcactcagagcactacatcaacaaatttccactagtggcaaagacgtccccctgatccaactgacttggcaactcaacgagaaagagtggattgctgcaaccggtttcggtatccgctcaatcgccttaggtcaccaccccaaacacctactggaagtggtaaacaacgaaattgaagcgctgcaaatacgccgcagcctacgccgagtcgaagcgcaaatacgggagaccgaacgccgctgtaatgcgctgatcgcatcgtcaagagatccaatcgcctatgtgcatgaaggcatgcacattcaggcaaaccaagcttatctggaaatgtttggattcgaatcgtttgaagacattgaggggctaccactgttagatttgattgcaggtccacacatggaaggattcaagcatctgctcaaaacactctccaaaggagagaaaccaccatcgcaatataaattcgatgcgtgtcacgtaaatggcaacatatttccagcaacaatggagttcaccaccacaacatacgaaggtgaaccctgcatccaggtagtactccgtggctacgaagaattcgaccaagaattgacacgtgaaatcgaaaaactgcgtcaacgtgatcctattaccggcctgctaaatcgcccagccttcatcatcgcattagaagatgctgtagcacgcgccggtatgaacggagatcaatttggcttgctactagttgaacctaaccattacacaagaatcctacaagaaatcggcttggactcggcggacacactcatcacctcactcgcaaatttcttttctgaaatgatcgattcaaaagtagaagtgcgaaccgcgcgtttctgcgagaccagattcgcactgctgttagagggcgattacacccataccatgacactggctgaacgtatccgcattgacatcgcacaacatatattcctgcttggaaaacactcaaccacagtcacagtaagcattggcggtgtacaaataggcgaacgcatcgccaatttgtgccaagtcctccatcacgccgccgagtcagttcagattgccactcagcttggtggcaacactgccatcatctacgatccagcggcagcggatcgcgcagaggaactgcgaatcaagaacttgctaaaacaactgcagcaagcagtgacaaacaacgacttcaccctttattaccaaccgataatgagtctgcagcaacaatccctggagctataccaaatttacctacgtatgcatggagacgaagaactcatttcgtcggttacactgctagaaatcgccgagaaacgcgagttgatcgcacaaattgatcgatgggtagtggcgcgtgcgatcgcacagatcggtgaacgccagcgggccggccataccacgcatttactggtacagatcgactcggcttcgtttaccgacccgcagttactcaccatgctacgtacagaattagcagcacatcatgttcgtggggagcaactgtggttacaaacgccggaatcaaaagtgttcacccatttatataatgcgcagcagtttcttagtgaaatctcagtacaaggctgcaaaatggggctagaacagttcggtacaggactggactcattccagttattgacacatttcaagccagcattcctaaaattggatcgtaacctaactcaagacatcaactccaaccatgacagtctagagaagattcgtgagataacttcacgtgcgcaagacaacggaattgcaaccttcgccgaattcgtgaccgactcaacgtcgatgagcgcattattcaaagtaggcgtggactacgtgcaaggtgacttcgtcgcgccaatcagcacaacaatgaacaacgagttctaatacgagtactactcttatttgtgttaccccctcaacaaggttggaaaagatacataaaaatagtcctttattgtctttccggaccatagcggaccacaaattactagacccaactgtgcatgaggagtatagaaaaatgtaaacatcaatcgctaaacatggctaataactgtattacataattagttaaaagctaaattagaatccgataattaagcagcaactaaagcgaaagtgaacattattgtctagccacacgaagcgcagcaatacgctcactcaaaggcggatgactcaaaaaaagcttacgcagcccttcaccgataccgccataaataccaaaagcttgcacttgcgtcggtaacgtactttgaccatggttaatcccaagccgctctaatgcagcaatcattttattacgaccggccaagtatgcgccgccctcatcagcacgaaactcacgacgacgcgaaaaccacatggtaatcatcgttgcaaaaaggccaaacaataattccaataccaatacaatcgcgtagtaagcaacaccacgagcaccgccacgatttccggaaagcagactgtcaataaaccctccgacgacccgcgctagtacgatcacaaatgtattaagcacgccctgcagcaacgccatagtcaccatgtcaccgttagcaacatgcgcgatctcatgccccaacactgcctcgacctcatcctgactcatgttctgtaataaaccggtagacactgccaccagtgcattgttgcgatcagcaccagttgcaaaagcattgatctcaactccctcatagatagctatctcaggcctgccgatgccaacaatctcggcttgccgacttaccgtgtctagtaaccagcgctcacttagattccggggttgatcaatcacataggcaccagtcgtacgcttagcgatggctttagacatcaatagcgagataaacgaaccagcgaagccaaaaattaaggccataaccaacagcccactcatttgtgtcggattgacacccagcaacgacatcacgatgctagctaaaatcaacactgcaagattggtgatggcaaacaagacaatacgagtcaacatataacgaatattccaaaatacggaaaagaatacacatcagaatgtgtggccagtctcagtgaatatcaagcgataaaactgattgatattcagtggatcatgcgtgatcgaatctactgagggcgtttcgcacctttacctacggtgcccctcactaattagctcgatcttgagcacaatactcgcgtgctgctcactatgtagaaatggctgattgagagttgaaaaattgaacaaagcacgttaattatcaggcactactgatgcgcaactacaacgtttatcttgcacctcaatgcagtagcagagtcgcacaatcatgtatacctcatcgtatcggacagatcttcatctgtatgcaacttggtaagcattagatcaatgccgcacatcctacggacagcaatggagtggccgaaattataatacgcaaagaatacctcactttttcacagaacgtctgccacatacagcaattcctggagataaattcatccacccagcaaggcaaaaggaacataaatacatactcaaaaaactttatgctttatcctagtctctgaagcacttagaatatttttataacaagacgcttatcttgagttcgaagaattcaagcgtaattgctagacaagatcaatcaaactgttgatagacaacatctgaatctgaaacagaggagcatacaggcataagctcaattttctattcaacatcaatcgcacaaggctcaaaaatatttaagaagcaatcaccctaaagattaagatcaccccaatcatcagatctagaaatgcggtaaagacgaaccaactgagccgttattaaagctgatatgcacgaatcactaatttcaccaatatacgaaagtaccccatctagcatcaacctcaataaaacttcatatcacaaagagacagcaagccacacattacttttatatacaaaacgcgcaacagcatattacagtatcgatcttatctcccacatattacacaacgagaatctaagaacacacgctcgcaccatttaataccaacgcaccaatgacaatgactactgtgctgcacacactgctacagtcaagattgaccgatcaatggctacactcagcattatcaagaaatacccaaaccacacaatccacaatacttaatatcttcagaaacatcgcaactgaagagacaccgtagttaatccttgaaggtaaaactccaaagttccacgtccacacgccgaaacagcagaggaaaatatctgattatttctgctaaaaattagggaggggcgaaaaacagaaaataatgagcgaacgcctcactttcaattaaaatactaaaaagaattgtctatttctatgacaattcactacaaatggaaactatttataatgcagtacacaagcatcatttaatttattggttcaaaagtcgagagagatcaatcaaccaacttattgaatgcaatctttagaattatcaaggtaaccccgcacaaccagcagatgcaatttcagtgcgaacacttaatttagacactgtagtcgggcgctgtgcagagaaagaactattaaaattgacaccaataacttaggacacttaaaattaagacacactacaatttttgaaataacaacggcgaaccgagattaaatcggtccgccgtttgaaaaaatccaacgacctagaccgccggactacaaagcactctagttaaccaataaccttcgaaaccacgccagcacccactgtccgcccaccttcacggatcgcaaagcgctgaccctcacccatcgccacaggattaatcagcgataccgtcaccttcacattatcaccaggcatcaccatctctacaccctcaggtaaacacaccttaccggtaatgtctgttgtacgcatataaaactgcggagtgtatccattgaaaaacggagtgtgacgaccaccctcctctttcgaaagcacatacacctcagcctcaaattctttatgcgccttgatcgaaccaggcttcgccaacacctgaccacgctccacttcatcacgcttcgtaccgcgcaacaacagacccgcgttgtcaccagcctgaccttgatccaataacttacggaacatctcaacacccgtcacaatcgtcttcgacgtcggacgaatgccaacaatttccacctcatcgccgaccttaatcacaccgcattcaacacgacctgtcaccacagtgccacgaccagaaatcgaaaacacatcttccacaggcatcaaaaacggacgatcaatcgcacgctccggattcggaatgtgggtatccaatgcttccgccagtcgaataatcgccggtacaccaatctcagactgatcaccctccagcgccttcaacgccgaacctctcacaataggagtgtcatcaccaggaaaatcatacttgctcaacaactcgcgaacttccatctccacaagctcaagcaactcagcatcatccaccatgtcagccttattcaagaacacaacaatgtaaggcacacccacctggcgagccaacaaaatgtgttcacgagtctgaggcatcggaccatcagcagcagaacatactaaaatcgcaccatccatctgcgccgcacctgtaatcatgtttttcacataatcagcatgaccaggacagtccacatgggcatagtggcggacttcagtttcatactcaacgtgcgccgtagaaatagtaatcccgcgcgccttctcttcaggtgccgcgtcaatcgcatcgtatgccttaaactcgccaccaaaacgctcagcacccaccttggtcagcgccgcagtcagtgtagtcttgccatggtcaacgtgaccaatcgtaccaacatttacgtgcaacttagtgcgtttgaacttatcctgggccatagaattagaaacctcttctgctaaatttttactcgattttaataacacagcgcccagcagaagagccgttgtttatggccttcggcaagctggcaaacgctaccgtttaagttttcttgatgacagtatcggcaatgttggcaggtgcctcttcgtaatggtcaaattccatcgcaaaagtagcccgtccttgcgtcatcgaacgcagggaggtggcatatccaaacatctcgcccaatggaatcatcgcattgataactttacccgaaagactatcatcctgcccttgcaaaacaccacggcgacgacttacatcacccatgatatcccccaaataatcttcaggactgacaatttcaaccttcatgattggctcgagtaacacaggattagccttagcgaaaccctgtttgaacgccattgaggcagcaagcttaaacgccatttctgaggagtcaacatcatggtatgaaccgaaaaccagcttaactttcactccgacgaccgggaaaccagccaacggaccactggtaatagtttcacgcaatcccttctcaatcggtgagataaattctttaggtataacaccgccggtaatttcgttaataaacaaaaaatcacccttcacatctggatgctgtttatcgacatcgctcattggcgaaatctcaatcaccacatgaccatactgacccttaccacccgactgttttacgtgtttataatccgacttcacatcgctcttacggatcgtctcacgataagctacttgtggcttaccaacattggcctcgacattaaattcacgacgcatacggtcaacaataatgtctagatgcagttcacccatacccgaaataatggtttgacctgattcctcgtcagtcttgacacggaaagaaggatcttcctgcgcaagacgtcccagagccattcccattttttcctgatcggatttagtcttaggctcaaccgccattgaaatcaccggttcagggaaaatcatccgctctagagtgatgatatggttttggtcacatagagtatcgccagttgtgacatccttcagacctaccgcagcagcgatgtcaccagcgcgaacttcttttatttcgtcccgttggttggagtgcatttgtaaaatccgtcccacacgttcctttttcaatttgacggagttatacacttggtcaccagaattcagtacaccagagtaaacacgaaagaatgtcagcgaaccaacaaatggatcagtcataatcttgaaggctaaagccgaaaaaggctcgctatccgaagccttgcagcggcattcgttccctttttcatccaagccctgcaccggagggcgatcagctggcgaaggcaacaggtgtatgacgccatcaagcatcgcttgcacacccttattcttgaatgctgaaccacaaaacacaggtataatttcaaccttcaatgtacgctcacggagcccttgtaatatttcctgttctttcaactcaccttcattcaggtacttatccattaattcttcagtcgcctctgcggcggcctcgaccataaaggcacgcgcctttgaagctttatcaactaattcaatggggatatcacggtattcaaagacagtgccctgcgacgcagcatcccaatggatagctttcattttcagaaggtcaatcaccccctcaaaaccatcttctgcaccaatcggcacttgcataggcacaggataagcacctagacgcgccttcaattgctcgacgactttatcaaagttagcaccggtacgatccatcttattgacgaaagccatgcgtggcacaaaatacttattagcctgacgccacactgtctcggactgcggctgcacaccgccgacggcacatagtacgaataccgcgccatcaagcacacgcagggaacgctccacttctatggtgaagtcaacatgcccaggggtatcaatgatattaaaacggtgctgcggcatagatttatccataccggaccaaaacacagtagtcgcagcggaagtgatagtgatgccacgttcctgttcctgctccatccaatccatcaccgcagcaccatcatgaacttcacccatttggtgacaaacaccagcatagaaaaggatgcgctcggaggtagtggtcttaccagcatcaatatgagccatgatgccaatgttacgataacgatgaataggagtggcacgaaccacgggaacctctcaattcctcaaatttcaaatggccaaacgccgcttcccaacggccttcggatgagacacagcactgttactattagcaaagagtatttatgaaacaccaaaaaaccctttaccaaaaatctataaatcaccaacggtagtgggcaaaggctttatttgcttcagccatacggtgagtttcctcccgttttttgatggcaccgccacgactctcagatgcatcaagcaattctgccgccaatttatgtggcatagagttttcgccacgtttacgtgaggaatctatcaaccaacgcatcgccagcgccatgcgacgcgaagcgcgtacctctactggcacttggtaagtcgcaccacctacacgacgcgacttaacctcaacagcaggcgagacattgtcaagggccttctgaagcaattcgatagcatttgaatttttctcaccaataacattcatcgcgccatagacgattttttcggcaacagacttcttaccacttttcatcaccatattgatgaaacgcgcaatagtttcactaccatattttggatctggcagaacattacgctgcggagtagaacctttacgagacattattcgctgactcctttaactcttcgggcgctttgcgccatacttcgaacggccctgacgccgcttggcgacaccagcagcgtcaagcgaaccacgcaccgtatgatatcgcacaccgggcaaatccttgacacgaccaccacgaattaaaacgacagaatgctcttgcaaattgtgaccttcaccacctatgtagctaatgacctcttcttgattggttagacgcactttagcaaccttacgcaatgcagagttaggttttttaggggtgctagtgtatacacgagtacacactccacggcgctgaggacacttatcaagtgccggggaggcgctcttgtaagtactcgcttgccgcggcttgcgaactaattgattaatagttgccatcgtagattcttctaaataaagcacaagagcctgtgcattaattaataaagggaagcaatgcagttaactgcattgccgttaacaaaaaccgtataattgacagatgaacaaactgccaatgaagcaagaaattcagacctactgaccgcggcctaataatcaaatcatcgcacaataccgttatgatagctatttttcgacggttgatagtaagcagaatttatgattcatccgaatactcaaaaacccaccttaccccccaagaggaatcgcatccttggaaggcgaagtaacttctgtaccagatgaggtactgcgaccaaccaaggtttccatttcagactgagtaagaccaacagaactatagcgacgctggctatgatacctctggccagtacccgccgggataaggcgaccaacgatgacattttccttcaaaccacgcaaattatccctggtccctcgtaccgcagcctcagttaagacacgggtcgtttcttggaaagaagctgccgagatgaacgattccgttgccaaagaagccttagtaatacctagtaacactggattgtactttgctggtaattcattgcgcgcaattaacttcgcgttttcatcgataacacgctgacgttcaacttgctcaccattgaggaacttactgtttccctgatcaacaatctcaactttgcgcaacatttggcgtgtaatgacttcaatatgcttatcattgatcttcacaccctgcaaacgatacacatcctgtatttctttaaccaagtaagcagctaacggctcgatacccagtaaacgcaaaatatcctgtggactcggctcaccgtccacaatggtctcccccttggtgacatgctcgccctcgaacacaataatttgacggtacttaggaatcaactcttcgtgctcgcttccatcggcatctttaataatcaatcgctgcttacctttggtgtctttaccaaaacttatcacccctgaacgttcagccaaaatagcaggatctttcggcctacgcgcttcgaacagatccgccacccgaggcaaaccgccagtgatatcccgagttttggaggcctcctgtggaatcttagccaccacatcaccaatgccaactggagcaccatcctgaagattaacaatcgaacgcggaggcaacaaatactgagctgaaagatcagtaccgggaatagtcagatcgttaccttttttatcaacgatacgcaccaaaggacgaagatccttaccttgggaaccacggcgcttcaaatcagcaatctcacgcgaagataaaccagtcagatcatcagttttctcaatgacagtgacaccatcaacaaagtcgataaaacggacaaaacctgcaacttcagaaacaattgggtgattgtggggatcccaatttgccaagatttgccctgatttaacttcagccatatccttgacatttatagtcgcaccgtaaggtaacttgtagcgttcacgctcacggccgtgagtatctagaaccgaaatttctccggaacgagatactgccaccaaagtaccattgacatgctcaacatactttagattagtaaattttaccgagccgctagtttttacagtaatgttatctaccgctgctgcactcaacgcggtaccaccaatatggaaggtacgcatcgtcaactgcgtacctggttcaccgattgattgagcagcaatgacacctactgcttcacccatattaaccaaatgaccacgagcaagatccctaccatagcatagggcgcatacgccaaacggagactcacatgtgataggagaacgaaccttcactgactgcacaccggcctcttccaacttagctacccattgctcatcaagcaaggtgctacgagtgacaatgggctcatcatcattaccaggcaggaatacatcctcagcaacaacacgtcctaacacgcgatccttaagtggctcaacaacatctccaccttcaacgatcggggtcatagttaatccaccagcagtgccgcaatcaagctgtacaacacataaatcttgagtgacatcaaccagacggcgagtcaggtaaccagagttcgctgtcttcaatgccgtatcagccaaacctttacgagcaccatgcgtagagttgaaatattcctgaacactcaaaccttcacgaaagttagctttgataggtgtctcaatgatcgagccatcaggacgtaccattagaccacgcatagcagctaattggcgaatctgctgcgggctaccgcgcgcgccagaatcagccatgatatacagcgaattcatcgacttctgatcaacgatttcaccatcagtgttaaccactttctcagtgccgatagtatccatcattgccttggcaatccgttcattagtacgggaccaaatatcaaccactttgttataacgctcgccagcggtaaccaatccggattgatactgctcctgaatctcgagcacttcttgctcagcttcacccaatatttctttcttttcgataggaatcagcatgtcatcaatacagattgacacaccggcacgtgtcgcataggcataacccgtatacatcaatttatctgcaaatacaacggtgtccttcaagccaagcatgcgataacttgaattaatcaacctcgaaatgttctttttagtcatttcagtattgacaagaacaaacggcaaaccttctggaagaatctcactcaataatgcacgacctaccgtagtatctacaatcaaagaagccttgctacgcagccctcgatcatcagtctctatctctgtaatacgaaccttcaccttagcatgcaattcaacaacgctattgtcgtaagcacgtttcagctcgctggtattggcgaacaccatcccttcgcccttcttattttcaagtgcacggctcatgtagtacaagccaagtacaacatcctgtgatggtacgatgatcggctcaccattcgctggagacagtatgttgttggtagacatcatcaacgcacgcgcttcaagctgagcttcgagcgaaagaggcacatgcacggccatctgatcgccatcgaaatcagcattgaatgcagtacaaaccaacggatgtaactgaatcgctttaccttcaattaaaactggctcaaaggcttgaataccctggcgatgtaaagttggcgcacgattcaataccacaggatgctcagaaataacctcttcaagaatatcccagacctcggcttcttcacgctcaaccagttttttagctgccttaatcgtagtagccaagccgcgacgctgcagcttagcaaacacaaaaggtttgaatagctcaagcgccatttttttcggtaatccacattggtgtaaccgaagattagggcctacgataatcactgaacgagcagagtaatcgacacgctttccaagcaaattttggcgaaaacggccctgtttacccttaatcatgtccgctaacgattttaagggacgcttattagtaccagtaatagcacgcccgcgacgaccgttgtctagcaacgcgtcaaccgattcttgcaacatgcgcttctcgttgcgcacgatgatgtcaggagcacttaactccaataagcggcacagacgattgttacgattaatgactcgacggtacaggtcattaagatcagaggttgcgaagcgaccgccgtccaacggcaccagcggccgcaggtctgggggtagtacaggcaacacggtcaaaatcatccattccggacgattgccagattcgatgaacgcttcaatcaacttaatacgtttagtcaaacgtttcagcttagtctcagaaccagtgacaacgatttcctcacgcaaacgagccatttccgattgcaagtcaatcattcgcaagagttcgtatacagcttcggctcccatagtagcatcgaagtcatcagcatgctcttgacgggcttgcaaatattgttcttcggttaggagctgacgccgttctaaaggagttagacccggctcagtcactacataggcttcgaagtacaagacacgctcgatatcacgcaaagtcatgtccagcattaatccaatgcgtgaaggtagcgattttaagaaccaaatatgagcaacaggcgaagctagctcaatggaacccatacgctcacggcgtactttggctaaagtcacctcggtaccgcatttctcacagaccacccctcgatgcttcatgcgcttatatttgccgcataaacattcatagtccttgataggaccaaagatagcagcacaaaacaaaccatcacgctcaggcttaaaagtgcgatagttgattgtttccggcttcttcacttcaccgaacgaccaagatctaatcaaggcaggcgaggcaaggccaatcttgatggcatcgaaatccaatgtctggcgctgctgattaaaaagattgagtagatctttcatacttcttctccgaaattcgggcatcgggacgagttggaaacagaggacaatggagctctgggcctccaaacagatgaattaatccataacaacgcatcttagttatcttccaactcaatattaattgctaaggagcggatttctttcacgagaacattaaaagattcaggcatacctgccaccatctgatgatcgccatcaacaatgttcttgtacatctgattacgcccctgcacatcatcagactttacagtcaacatttcctgcagtgtgtaagctgcaccataagcttccaaggcccaaacttccatttcgccaaaacgctgccctccaaactgggccttaccacccaatggttgctgcgtaaccagtgaataagggccagttgaacgagcgtgcatcttgtcatcaaccaaatggttcaactttaaatagtgcatgtaaccgaccgtagtcttacgatcgaaaggttccccagtatggccatcgtagagttgggtctgaccgccggtcggcaattccgcgagatccagcatacgcttgatctcttgttcagaggcaccatcgaaaaccgggctcgccatcggcacaccatcagtcagattcttagccatattcagcaattcgtcatcactgaactgagacagatctacacgctcgccaaccacgcttttatcatgattataaatttcattaagaaattttcttaagtccgcaatagcagcattggcctccagcatacgctgaattcgatgccccaaacccttagctgcccaccccaaatgcacctctaagatttggccaatattcatacgagagggaacgcccaacggatttaacacgatatcgacaggtgtcccatcctccataaatggcatgtcttcaacgggaacaacgttggaaaccacacctttattaccatgacgtccggccatcttatcgccaggctgaatacaacgctttacagccaaaaacaccttgaccattttcaatacacccggagccaagtcgtccccctgagtgattttgctacgcttgtcagaaaaacgctgatcaaactctttctgatacgcttgtatctgtttctgcgccctatcgattgcctcaacagcaacctcatccttcatacgcaatgcaaaccagtcactcttcttcaaaccatcaagataagcaccagtgatgacctcaccctttttgatatcaacaccggagttaaccaccttacctacaatctgagaacgcaaacgagcataaatagcaccttctagaatacgaaattgatcatcaaaatcctttttgacacgcttgatttcatactcttcaatctggtgcgcacgcttgtccttctcaataccatcacgggtgaacacctggacatcaattacagtaccatccatgcccggaggtacacgaagcgaactatccttcacatccgaagctttttcaccaaagatggcacgcagcaacttttcttctggagttaactgactttctcccttcggcgtgactttaccaaccaaaatatcgccagcgcgcacctcagcaccgatgtacaccacaccagactcatctagacgatttaatgcctgctcagagacgttagggatgtcagctgaaatttcctctgatcccaacttggtatcgcgcgcaatacaagtcagctcctcaatgtggattgtagtgtagcgatcctcttcaacaacgcgttcagaaagtaaaattgaatcttcgaagttgtagccattccaaggcataaaagcgatcagcatgttttgcccaagagccaattcgccaatgtcagtcgatgggccatcggccagtacgtcaccactagtaactatgtcgccaacattcacaaggggacgctgattgatacatgtattctgatttgagcgtgtatatttgatcaatccatatatatcaacaccagcatcagtggcaccaataatctcactttcgttgactttaaccacgatacggccagcatcgacctgatcaatcacacctccacggcgcgcattcacggtcacacccgagtcacgcgccactgtacgctcaataccagtaccaactaacggtttctgagcacgcaaggtgggcacagcttggcgctgcatgttcgcacccattaatgcgcgattcgcgtcatcatgctccaagaatggcaccaaagcagcagcaactgatactgtttgcatcggcgaaacatccatgtaatgaacataagatgggggcttcaagagggactccccctgaaaacgacatggcacaaatgactcggttaattgcccattatcatcagtcagcgtgttcgcctgtgcaataacatactgattttcctcaatcgccgacaagtactcaacttcatcggtaacgcgaccttccacaaccttgcgatacggtgtctcaaggaagccatattggttggtacgagcaaacacggccagtgaattgattaggccaatattgggaccttcaggggtttcgatcgtacataagcagccataatgacttaaatgaacatcacgcacttcgaaaccagctcgctcacgcgttaatccacctggacccaatgccgaaagacgacgcttatgagtcacttccgacaaaggattattctgatccatgaactgggacaattgggaggaaccgaagaattccttaatcgcggcagcgaccggtttagcattgatcaactcttgaggcgtaagcccctcggattcagccattgacaaacgttccttgacagcacgttcgacacggacaagcccaacacggaagacattttctgccatctcaccgacagaacgcacccgacggttacccagatgatcaatatcgtccacaacaccacgaccattacgaatctcacacaaacctttaatcacatcaaggatatcggaagtttcgcccagcttagaaactaagcgcctggattcttcatcattacgatctgaaaaatactttttatcgtaaagaacaggctcgccagcgacttctttacggccaacacgacgattaaacttcatgcgaccaaccattgataagtcgtaacgatcaaaagtaaaaaataaattatgaaataagttttgagctgcctccttagttggcggctctcctggacgcatcatgcgatatatctcgacctgcgcctcaagctgagttctagtcggatcaatacgcaaagtattagatagataagcaccacgatccaaatcgttcacccaaagggttccgaccgagtcgataccagccttgcgaaaagcaactatgcgatcctcattcacctcactgttggcactggctaacaattcaccagtcgtcgcatcaatcacgtcatgcgataaaatacggccaattagatactcatccggcacagctaatgcagaaatacccgaagcctccaactgcttcacatgacgcgcagtgatacgcttaccggcttcaacaatcacgccgccaccgtcagtcagattgaaacttaatatctcaccacgtagccgctcgggcaccaactcaagctgcacccctttatcaggattaatatgaaacgtattaatttcaaaaaattcgccaagtatttcctcgttagaataaccgagtgcacgcaacaaaatagataccggcaacttacggcgacggtcaatacgggtaaatagcgcatcttttgggtcgaattcgaagtccaaccatgaacctcgacaaggaatgatacgagcgctataaagcaatttacccgaactgtgtgtcttgccacggtcgtggtcaaaaaagacacctggggatcgatgcagctgcgaaacaatgactcgctcggtaccattcacaatgaaggtaccgttttcagtcatcaaggggatttcaccaagatatacttcctgctccttaatgtacttaactgcttttgtcgatgactcacgatcataaatgactaaacgaacggtcacgcgcagcggcgcaccataactcataccacgctgccgacattcacgctcatcgaacatcggctcaccaagtttgtaaccgacatattccaaagcagcattaccgctgtaactgacaataggaaatactgatttcagtgccgcatgtaaaccaatgtctttacgttggctggactccacgtctccttgaaggaatgcacgataagagtccacctggatagctaacaaaaacggcaccttgaggattgaacgatgcttgccgaaatccttgcggatacgcttcttttcggtgaacgaataggatgtcataagatctttcacctttagggtgtacaggccgcgcgtccgcggctctaacgtaacgagttaccagttgaaagcacgggtattagacaccaacgtttcttctcccgttactttcaactaccaagaaactataagttgaattttgaatttccgaacatccaaataacagcctttgtaagggataaaaggctgggagctgtcccagccttcaatgaatcactacgggatgtcgacaatgcaaaatagcgtttacttgacctctacagttgcacccgcagcctcaagctcttttttaactttctcagcctcttcctttgagacagcttctttcaatataccgcccgcttcagtaagatccttggcttctttaagccccaaaccagtgacagcacgaactgctttgatcacttcaactttctttgctccagcttctttcagagtgacggtaaattcagtctgctcttctaccggagcagcagcagcagctgaaccagaaaccataacaggagcagcagcagaaacgccaaacttatcttcaatggccttaacaagctccataacttccattatggatttctcggcaatagcttcgacaatcttctcgttggtgagggacatgataattacctttagatagtttctgagatggatttctagcgagtctttaacgcatcacgcttgactggcttcaggcgctgacacagcaacagtttcacttttgtcatcagccacagctttaatagcacgtgcgaacaatgtgaccggctcggataaaacacgagctagcatagccagagcctgcaatcgtgttggcaatgatgcaaggacatcgacatgaccagccggatacagcacaccaccaagggatactgtttttgacttgagcttgtcatgttttttagaaaattccttaattagacgacccgcagcacctggatcctccagggaaaacgcataaaggagagggccgattaacttttctttaataacagcgtattcggtatctccaagggcacgcgcagccaacttattcttaacaactttcagatacacaccactctctcgagcctgcttacgcatcgcagtcatctgggaaacagtgatgccagcatattcagcgacaatcaacgagtgagctttagtagcaactcctgccaactcttcaacaacttcctgtttctgaaaaatattaagagccattggccccctccattaaagatgggaaaacaaaaatggctaagttatagtgaaaaaatcgcatatacatttcgaaaggaccccactcccgttgctctgcttcaaataacccgctcacggctcctgccgattacggtttcgggcagcttccctcatggaagccaagacataatcacgttcaagattgagtggctgttctagacctggaactagcacaactcgggaacgccccagagcttcgtgaaccagaaaattccagaagagcgacaccatctacgtaggctttcccttaaagaaaaattaagcgttctacagacttaagtaaaaatcacaaaagtcatcgcagaacccacctacgatctttgatggctatcgagagttaaacacccacgaccgcctccaaaaggccctacacatttatagcggtggaccaaaagccgggaaaatcggctataaaattacattaatgaagcacaccagacgcattaattcgaccacaccaaaattacttaagagataaagtagattggtcaatcattacgcctggacccatagtcgaactcaatgacactttttgcaaataagcacctttagaagcagtcggtttgattttaattaagtcaactaacaatgcttgtaagtttaacttcaatgcttcatcgtcaaaattcaccttaccaatcacacaatgaatgataccagccttgtcagcacgataacgaacttggccagatttagcattcttaacagcttcgccaggattttgagataccgtaccaactttcggattaggcataagaccacgaggcccaagcaaagtacccaacttaccaacaacacgcatcgcatccggagtagcaatcacgacgtcgtaatttagatcgcccgcctgcatcttctcagccaaatcatccataccgaccgcatcagcaccagccgctaaagcatcctccgctttagcgccagatggaacaaacacagccacacgtacagccctaccagttccagcgggcaacaaggtcgagcctcggacctgttgatccgattttttgacatccacacctaaacgtatggcaacatccactgattcaataaacttggccttagttgccgtttttagaatcttaatcgcttcatcaatcccataagccttaccagggacaacagcgagatcaatagctttttgacgctttgtctgtaccataagttcaaccctccaccaccaaacccatactgcgagccgaacctgcaatcgtacgtacagcagcatctaaatcagcagccgtcatatcgagctccttagtcttagcgatatcctcaagctgcttgcgagtgactttgcccaccttctctgtgttgggacgcttggagccggattgtataccgacaattttcttcaacaaaatcgacgctggaggagtttttgtaataaaggtgaaagtacgatccgagtaagcagtaattactaccggaatcggcaaaccctgctcaaccttttgagttgcagcattaaacgccttacaaaaatccataatattcaaaccacgctgccccaaagcgggaccaacgggcggtgaaggagacgcctgaccggccttcacctgaagcttaatgtaagcaataactttctttgccacctgaaatatctccgggtaatagcgctttagaaacaggctccccatcatatcgagaaaagcacgcgtcccgacatcacgcatttaaacttactaattaaagactatttgaagccgcaaaaaacaagccctaacaggtcttagaataacgagtatagcaaatcttttatatttttcactgaataaaaaatagaaaaactcagcttttttggacctgaccaaactcaaggtcaacaggtgtaggacggccaaaaatcagtaccgccacacgcagacgattcttttcatagttaacttcctctacgagcccatcaaaatcattaaaggggccatctataactcgaaccatctgccctggctcaaataaaactttaggacgtggtttttcagctccatcctgaacacgacgcaagatagcatcagcctcatcactactgatcggcaacgggcgatcagcagtaccacctataaagcccattaccttcggggtctccttaaccaaatgccagcattcattatcgattctgggcacaccaccctcataataagtttcgatctgaatcaacacatagccagggaaaaatttgtgttcagaacggcgcttctgaccggaacgcatttccacaacttcttcggcaggaaccaacacatcaccaaaacgatcttgaatctcaatacgagaaatacgatcacgcagcgcctgcgcaactgacttctcgaaacctgaataggcatgaacaacataccagcgcttcacagcttaatcctcctcaacgcgataggaaccactgcgtgagcttctgtatcacgaaatcaaagccacccaacaacagactgagtatagtaatcatgacaattacaacccaagtgatacgaatagcctcctgacgtgtaggccagaccaccttacgcaactcaaaacgggactcaaacaagaatccacgaaattcacggccctttgctgtagtcataagcaccgatacagcagcgacgaaaacgagcataacaaccaaaccacgcaactgtggagcccaagaacccagcataagaaaatccacagctctactaaacaaaaaccatacaaacacccctaacaccaacagcaagctagcaatgaagtatttgaaaatatctccactaagaacggtgcttttaataggttcgatttttgttttcatcaggattcaatttaccgatttgagccaagtcacaaacccggaagaaagtggcgcgccaggagggactcgaacccccaacctgcggttttggagaccgctgctctgccaattgagctactgacgcttgagactcactcgcactacaatttttgaaataacaacggcgaaccgagattaaatcggtccgccgtttgaaaaaatccaacgacctagaccgccggactacaaagcactctagttaaccaataaccttcgaaaccacgccagcacccactgtccgcccaccttcacggatcgcaaagcgctgaccctcacccatcgccacaggattaatcagcgataccgtcaccttcacattatcaccaggcatcaccatctctacaccctcaggtaaacacaccttaccggtaatgtctgttgtacgcatataaaactgcggagtgtatccattgaaaaacggagtgtgacgaccaccctcctctttcgaaagcacatacacctcagcctcaaattctttatgcgccttgatcgaaccaggcttcgccaacacctgaccacgctccacttcatcacgcttcgtaccgcgcaacaacagacccgcgttgtcaccagcctgaccttgatccaataacttacggaacatctcaacacccgtcacaatcgtcttcgacgtcggacgaatgccaacaatttccacctcatcgccgaccttaatcacaccgcattcaacacgacctgtcaccacagtgccacgaccagaaatcgaaaacacatcttccacaggcatcaaaaacggacgatcaatcgcacgctccggattcggaatgtgggtatccaatgcttccgccagtcgaataatcgccggtacaccaatctcagactgatcaccctccagcgccttcaacgccgaacctctcacaataggagtgtcatcaccaggaaaatcatacttgctcaacaactcgcgaacttccatctccacaagctcaagcaactcagcatcatccaccatgtcagccttattcaagaacacaacaatgtaaggcacacccacctggcgagccaacaaaatgtgttcacgagtctgaggcatcggaccatcagcagcagaacatactaaaatcgcaccatccatctgcgccgcacctgtaatcatgtttttcacataatcagcatgaccaggacagtccacatgggcatagtggcggacttcagtttcatactcaacgtgcgccgtagaaatagtaatcccgcgcgccttctcttcaggtgccgcgtcaatcgcatcgtatgccttaaactcgccaccaaaacgctcagcacccaccttggtcagcgccgcagtcagtgtagtcttgccatggtcaacgtgaccaatcgtaccaacatttacgtgcaacttagtgcgtttgaacttatcctgggccatgagtatctgttctcaatattcgttaaaatctttaaataaaacctatggtgctcacgaatggaatcgaaccatcgacctcctccttaccaaggaggtgctctaccgactgagctacgtgagcacagcttggaattatgccacgctctaaaatcattaaattcaatggagcgggagacgggaatcgaacccgcaccatcagcttggaaggctgaggttctacctttgaactactcccgcacctagctaccagccacatgcacacaatgaaaatggtggagggaggtggattcgaaccaccgaaggcgcaagccagcagatttacagtctgcccccgttggccgcttgggtatccctcctgattttcaccaccacaagcaaccaggaaattatttcatttcaagcgatttaaaagcccctaattatcgcactaaataaaacccctgtcaacaaaacctctactacacagccaattcagaaccctgctttacaacaagcccaccatcaaaaaaatatacggcaaaaatgcatttagacagcaacagaatcatacgttaatgcgaaaatgcaacacatctccttcctgaacccgatattccttgccttccaaacgcatacgcccagcatcacgcgcgcctgcttcgcctttatatttaatgaagtcatcgaaagcaatcgtttcagcgcgaataaatcccttttcaaaatccgtatgaatcaccgcagcggcctgcggcgcggtggcaccagacttcacagtccaagcacgcacttccttcacacccgcagtaaagtaagtctgtaaaccgagcaacgcataagcagcacggactactcgattcaaccccggctcctccagaccaaggtcaaccaaaaatgcatcgcgatccacatcctccagctgagccagctcctcttcgatcactgcagaaatcggcactaactgagcattatcggaggcagcacggacacgtaaagcctcaagataaacattatcctgaaacccattttcaagcacattggcgatatacatcaccggcttgagcgtcagtaagaacaaatcgcggactaaagcacgttcatcctcatccaaaccagcagagcgagcagatttgccttcattaagcgcaacctgcaatctctcaagcacagacttgcaggcaatcgcttctttatcgccccccttggcagcacgcatcatgcggttgcacgccttctcgacagtgtcgagatcggccaatatcaattccgtatcaatgatttcaatgtcagccagaggatcaaccttaccggcaacatgaataatctgaccgtgttcgaaacaacgcactacatgagcgatcgcatcaacctcgcgaatatgcgctagaaacttattgcccaacccttcaccactagccgcaccagcaaccaagcctgcaatatcaacgaactcaatcactgtcggcagtaacttctgtggcttgacgatttcggccaattgattaagacgtggatctggaacaggcacgacacccacgttaggctcaattgtacagaatgggaagttagccgcagcgataccagctttagtcaacgcattgaacaaagtcgacttaccaacattaggcaacccaacgataccgcatttaatacccatatagattttccaatcacaccaccgtatgtagctttttcatcgcctcatcaaagtcaccagcaaccactaaaggtaacactgcactggctcgttccaaagcagcgtcgatagcaatattttcttcgcacgttggacaacctagcacccaattcaccacacgatctttatgaccaggatgaccaatacctacacgcagccgatgaaaacgtccgtgaccaagcaacttggtaatatcacgcaacccattctgaccaccatgaccaccatcaaacttcaagcgcacagcccccggcggaaaatccaactcatcgtgagcaaccaacatctgctccggtttaatcttccaaaaactcaaacctgcacaaatcgacttgccgctcaaattcataaaagtgactgggcgtaataaccatacccactgcccagcgataaatacacgagcaacgtgagcaaacaacttagactccaacatccagcgctgcccctcacgctgaactaaaccatcaacaaagcgaaacccggcattgtgccgggttttggtgtgctcgctacccggattgccgagcccaactatcaaacgcaaccctaacatgtgaacgttgtcattgcattaccccaccatttgagatgcaaggaatgcagcatcattacttggtgtcaccctcaccttcttcctctgcgggagtgtcatcctcaatcactacatgcttagcaatgactacggccatatcgtgctctttatccaaccgagtcgacaactcaacaccgattgggaacgtaatatcagacaggtgaattacgtgaccgacactcaacgtggacaaatcaacctcaatgaactcgggcaaatctttcggcaaacacgatacatgcacctcattcaattcgtgggtaatcaccacgccactcgccttgccagcaggtgaagtagcctggttgatgaaatgcaacggcacagcaacactcagcttggcatccgaactaacgcgctgaaagtcaacatgcataaccaactgacgataaggatggcgctgtaaatcacgcagtagcaccttctcgcccccccccccatcgacattcagatcgagaatagaggaatagaaccactcgttctgttgagcaagccaaatctgctcatgattgagttggatactcactggacgctgctcgccgccataaataatggctggaatcatgccagcatgacgcaggcggcggctcgcacccttcccctcgtctttacggcgctgcgctttaatttgatgatttgccatattattttactaccttataaaagttgagaaaccgcctcgcagcgatagaaggcgaccctctcgcgaccaaaagagtcgtttttaaaaacagcccgatgggccatgcaatcaatccacatacagtgaactgactgattcaccaaaagcaatacgccgaatagtctcagcaagcaattcagccacactaagctggcgaatttttcggcattcccgagctgcatcagacaacggaatggtatcggtcaccacaagctcgtcaagctcagagttattaatattgtccacagcaggaccggacagcaccggatgcgtgatataagcaacaaccttagtagcaccattttgtttaagtgctacggccgccgcacacaaagtaccggcagtatccactaaatcatcgaccaacacacaggtcttaccgttaacctccccaataatattcattaccgtagcaacattagcacgcggacggcgcttatcaatgattgccagatcggtatcgcctaaacgcttagccatcgcacgggctctgaccaccccccccacatccggggaaaccacaattagattgtcagtaccataagcacgccaaatatcagccagcaacagaggcgaagcataaacgttgtctaccggcacatcgaaaaaaccctggatttgatcagcgtgcaaatcaatcgtcaacacacgatcagcaccaatcgcactgatcatttttgccgcaacctttgcggtaatcggtacacgcaaagaacgcatgcggcgatcctgacgcgaataaccgaagtacggaatcacggcagtgacactagaaacactggcacgcttgagcgcatcaatgataaccaacagttccatcaaattttcagcacttggcgcacaggtcggctgcaccacaaatacttcctgacgacgcacactttcctcaatttcgacctgctcctctccatcggaaaaacgcgacactaacgatttacccatacgcacccctaactccttacaaatactttgagtcagtggtttattggcattgcccgaaaagaccatcaaattgcgttcgtcttgaatggtaggcatctatcaggcagcaacgaagggtaaggttaagagagtaaaaccgaattaccaggaacactacgaacccaagcggcctgttccccaagcgggaacacatgaacttgaaaaccatcagaaaactggcaggggcggtaggattcgaacctacgaatgccgggatcaaaacccggtgccttagtcctcttggcgacgcccctgcatcaaaattccattgttttcagtacatcaagcagcggagaacgggaagcgccatcagcaacccaagcacacaacccgtacggcagccgctccaaagcacattcagcctcatcacgcgtactgaattccacaaagcaaccgctgccagagccagtcacccttgcaaaaccaacctctgaaagcacatcaagagcgcccgcaacggcagactcgcgccgtctcagaaccggctcgaatgcattaccaaacgcagtaccagcaatgaagtcgcctattgtcgcgggggacgcatcgcgcgtcaaatccggatcaaggaacagctcccgtgtcggcacacacacccctggatccaatagcaagtaggctgctccaggcagaatcatcggcgttaaacactcaccgacaccctcagcccacgcattacacccatgtacaaatacaggtacatcggctcccaaacgtaaccccaaggccgccaaaaccgcaacgtcaagcctggtgtgccacagtgcattcaacacaagaagcacagtcgccgcatcagaggacccaccgccaaagccgccacccactggaattcgcttttcaacaaagatatctgcccctaaatggacattagtcgcatattttagcaaataagccgcacgcaccaccaagtcgtcggcctcaacaaccccagtcactgactcaccaatgcgatgaatctgaccatcttcacgcacccgcagatggatcgtatcgccccagtcaagcagacgaaaaacagtctgcaattcatggtaaccatcaacacgtcgcccggtaatttgcaaaaacaaattcaacttggcaggtgctggccacgccgaccagcccacaccgtcatcaacgacgacactcacgggatcaactcgtcccattgatcgacaatcaaacgtatcctagccgaaccgcgactagcctcaatttgccgcggcaataccggacgccccacggaagacggaaaccaatccagaaacctcaactgccaccccctctgatacacacggtgaggacgtccctctgcatctaactgcacatccccacccccactattgcgacctcgtacccaatcaggcaataaccccatcggaacttgccagccagtcgcctcgaataacacctgttcggcaacttcgccaacacgcacccacccacccacaccctcaagacgagccggaccgctactacttccgctcaacacccaactctgacgactcattggagcacttaacacaatgcggtaaccgcgaccatgctgctcccactccaccctgacactcccaccatcacgcccctgactgatcgccgcacgtccgtgaaaaccccagttaggatgctcctgcaaccacgtttggcgagcctgctcaactacctgcgcagtggcatccaccatgaccggcaccgacgcacgtcggccaccactgctgctacacccaggtaacaaaaaagagactaccaacaagaacacacccaagcctctattcacatcatgcaaatacaccgtcataacccaaacttttccagtacatggcgcaacaccacattatccggatccaacttacgcgcttcctcaaaatagtaccgtgcctcctcacgctgaccatccgcccacagcacctcaccaacatgcacagcaatctctggctccttagctaatgaccaagcacgcttaagctccaccaacgcctccttaacccgtcccagccgatacatgacccaaccgtaactatcgataatcgaaggattatcaggctcagccgcacgggcacgatcaatcaacgccaacgcctccttgtagcgggtcgtatggttcgccaaggtataaccaagcgcattcaacgcgaccacattacccggatcggcaaccagcaacttacgcaaatcagcctcagcctgaacgatgtcatcacgacgctcccaagccagcgcacgcacataaagaagctcactgtcgttaggaaactcatccaatccacgcgcaaaagcgttcaattgacctgtagagtcacccaagcgctgttttaactcagcctcaaccaaataagcatcgcgacgctgctcattatcaatcgcagcatccccctgcaagcgatgcacctcatcgaacgcctcatcatagcgcttcaactcaaataacacgctgaccgcacgcaacaccgcctcaccacggagctccccatccagcaccccgcgataccaagaaagcgcatcctcgtaacgcatcagaaactcagcaatcttacctaacagaagacgcttctccggctcatgcgtcccgctcctgccactcaactcctcatacaaagcaatcaacgcatgcttgtcctgctggcgagctagcaacgaagcacgcaaaccgtaggtttgaacatcctgcggaccagtggcaagcacccgtgcagcagccttaccttcacccatgccttcataagtcaaagctaatgccccacgcagatccacatcagccaccgcacgccgctcaacctccttgagcttagaaagagcctgcttacgcttacccgcctgctgcaactgagcagcctgcaacaacgccacacgtggatccttaggaaagcgcagcatcaactggtcgatgatgtgcttcaccaatatcggctgctccaaacgcaacgccaaacgaccaaactcctgccagacttcaatccgattagggatatcaccgcggcgaaccaactcctccatcaacctaaccgacagctgcggatcacggccgccattgttgagtgcaatcaacgcataacgccaaccacggggatcaggattacgcagcaacccggtaagcccatggcgcgccatattgacctgctggcgacgcatagcgagtgatacttcgacctcacgcattgacaacgacttaggcgcgcggacaccccagatcgctaaagcacgctccgcaccgacatcatcacccgccaacatcgcaatgcgagcggcacgctcaacgagaccgacattcccaggctgaaaacgtgcagcctgcaaataccatctcgccgcattgctcagctgcccagattgcaatgcaaattcggccaccaaaacgggccccaaccaaggactcacctgagtcgccggatcgccaaaagccgcgcgagcagcaactgcaggaaacacgataaaaaacaacaatgaaactgtaaggatgcgaatcggcacgagcatcgggagcaaccggaccgtaaaatggagggcatgaataacaagcagcttatagcaagtaactgaacgatgacgttgtgggtactcggactgaaccatcaaactgcgccaatggagctacgcgaacgggcctctttcgtcggtgatgcattgccacgcgcacttgattcactgcgcaacctccccaatgtgaacgaagccgcactgctatccacctgcaaccgtaccgagttatacgccgagaccacaaatgcgcaaatactgctgaactggctcgaacaacacagaccaggattacaaaaccacttatatcaatatcgcgacgcagcggcagtcaggcacctattcagagtcgccacaggcctagactcaatggtcctcggggaatcacaaatcctcggccaagtcaaggattcctggtccatggcacgcacccacggcacccttggcaacacacttgaccggctattccaacacggcttctccgtcgccaagcacgcacgcaccaatacacggattggcgccaaccccgtctcaatagcctcaaccgcagtgcgactagcacaagacgccttctccccgctgaacgaatcgaccgtcttgctcatcggcaccggcgagaccatccaactggcagccaaacacctgagcgaaggacgagtacaacgcctgttaattgccaaccgcacccacgccaaagcgcagatgctggccagccagcatggtggctacgcactccccctgaccgaactaaacctccaccttgccgaagccgacatcatcttctcggccactgccgcacctacccccatagtcacccaatccaacgtcgaaagcgcactacacatccgaaaacgaaaacccatgctgctatttgacctagcaataccacgcgatatcgagaccgaagtaggaacactcaccgacgcctacctatacaccattgacgacctggaacgcgccgtggaagaaaaccggcgcagccggcgcgaagcagccgaaaccgctgaggccatcattgaattacaagtgaaacgctacatggatacacttcaagcgcatgcacaccaagccccactacggcgcctacgcaccttcggcacaacgacccgagacgaactgctgacacgcgcacgacaacaactagcaaacggccgtcccgccgaagaagtcctggaacaacttgcccatggcctgaccaaccgcctgttacaccctccaactgccgcactgcgcgaagccgcactcgccaacaacaccgagctagtccgtgcagcagaacaactctttccagagaagcccggctaccaccaccccacccttcagacaacgattgtgaaaaccgatgaaaccgaccctgcgtcgtaaactggaagcactcgtcgagcgccatgaagaactcgaacgcttgctctctgatccaaaaatcgtctctgacaccgacagattccgtacatactcccgcgaattggcgcaactcgcaccgattgcgaccacactggccgaagaaacccgcaccaaagccgatctagccgccgctgaaacactacgcaccgaccctgaaatgcgcgaacttgccgaacaagaaatcgccatagcccaagcacacctgaccacacttgacgaagaacttcagcgactcctgattcctcaagacccccgagacgaatgcaacctattcctggaagtacgcgccggcactggtggcgacgaagctgcaatctttgccggcaacctcttccggatgtacacccgctacgccgaacgccagcgctggaaagtcgaagtggaatcagacactcccggtgaacatggcggctataaagaaatcatagcgcgcattgtcggacgcggcgcctactcccgacttaaatttgaatccggcacacaccgcgtacaacgcgtgcctgcaaccgaatcccagggacgcatccatacttcagcagccaccgtcgcgattattccagaagccgacgaaatcgcagacatctcgatcaaccccgctgacctcaagatcgacacattccgctcctccggtgccggcggccaacacgtcaacaagaccgaatcggcaatccgcatcacccatctcccaaccggcgtcgtcgtcgaatcccaaaccgaacgcagccaacacgccaaccgcgacaaagcaatgaaacggctcaaagcacaactgatcgaaagcgaacgcagccaacaggccacagccgaagcaatgacacgtaaactgcaagtcggcagcggcgaccgcagccaacgtatccgcacctacaactttccccaaggccggatcaccgatcaccgtgtcgaaaacctgacactctacgaccttcccaacatcatcgaaggcgacctagaccccctgatcgaccgactacgacaagaacaccaagccgaagaactcgcacgactgagcaacgccccataacaccagcctggaacctcactggaacttcattcaacaaccttgcctaacaacaccatcatgcacagacactgactgaacagaaaccggcgataaccccacaaacattcccgccccacctcctgccccccccccctttgagcaaaccagccatcccactgcatagcgtctgcatggccagccacacacccaatagaccaacactgacacaacagccaccagtaccctggtgactaccccactaccaacaccatacagacatacagacatacagacatacagaccgcaacatcacctcctcagcttgagaaagcaccctcacccaaccccttctcaccttgaaaaaacacacatcgcaacctgaaaccatcacacccaccattgcccctaacggccctaccaccgcaaccgtacagcgcaacactgccgattacctccagagaaacaccccaacaactaccccactaccgccacaacagccacgtacgatggatcctcgtattgcgcgaaaaatctaaatcaatcgtcaccgggctgatttcctcacactgcgcaaacgcagcaaccgcatccacgtccaaacgaaaacgacggaaattattggaaaagtacagcaccccaccaggggttaaccgcgcaacagccgcacgcagcaaacgcacatgatcgcgttgcacatcaaaatcatcagcgcgcgccgaattcgaaaacgtcggcggatcacaaaaaatgacatcgtattgaccacgctccgcctccaaccaagccaacgcatccgcctgcaccaaacgatgcctcaccccaccttgcccattcaacgcaaaattatccgtacaccaatgcaaatacgtggatgacaaatccacactggttgtcgccgcagcaccagccactgccgcctccacactcgccacacccgtgtaacagaacacatttagaaaacgcttacccaccgcctcacgcgccatgcgcgcacgcaaaggacgatgatcaagaaacaaccccgtatccagataatcaaacaaattcacacgcaacaacgcaccatgctcacacacatgaaaaaactccccacgctgcgcaaaacaaccgtactgactcccccccttaccgcgctgccgcgtttttaaagccacctgagccaccgacacatcaaacaccgcgcgtaccgcagcaagcaactcatgacgccgccgccgcacatccccctcaggaatcgacgccggcgccgcatactcctgcacatggaggaataaccgccgcgcaccatccacctcctgatacacatcaatcgccgccgcatactccggcaaatcagcatcgtaaacccggtaacactccacccccgcccgcatacgccacttcttcaagcgctgcacattcttgcgcagacgattagcaaccatctgcgccccctcgctcaacgcctgcgctccccctgcctcacgtgctaacggcaccaccggatcacagacaatcaacacacattccaacgcaccgttgaaaaactgatacttcttaccagcccgcaaccccgttgcaaatgccaacggactactgccacacactagcgcggcccgccaccgcggcaccacacgccgtaacgcatcccccaaatgccgatacaaccccggattggccgccaaacgcacatcatagggcgcgttacacaccaccacaccgtgaggctcaaacaccgccggcagcacatcaataccggcaacaacaaactcaattgcatcttgaacacccgccgcccgcgcattcgcaaacgcagcaccaagtgcccgaggatcaatgtcactgccgtgtaacaccggacgcaactccgccaaccctcgcctggcacgctgctgcgcatcaaccactaaggcttcccacgccacgacatcaaaaccacgccaacgactcggcaacaacaccggacgctctgctaccgacacatgagatatcgcatcaggatcggcataacgcgacaacccaggcgccacatcggccaccatcaacgccccctcaatcaagagcgtgccactgccgcacatcggatcgagcagccccccaccttcggcatagaccttggcccagccggcacgcaacaacaccgcagccgccaaatgctccttcaatgacgccgcatgcggtgcctgacgccaaccacggtgatgcagcgcccgaccacccagatccaccgacaacgtcgcacgccccttgcggagcgacaaattcaaacgtacatccgggtgctccacatcaaccgatggccgcaccacaccagcatcacgcaacgtatcgaccaccgcatccttcacacgctgtgcagcataacgcgcatgagtgatcgcctccccggaaacgtgcgcatccaccgccaacgtctggcccggcaaaacatgctccacccacggcaacgccgcaacaccggcatacaacgcatcctcatccgcacatgcgaacgccgccaacggccacaacacacggctggccaaacgcgaccacagcaccagacgctgcgcatcgcacaacccaccttccacattgacaccggccactgtcgccgtagccccaacggcaccaagcgccaacacttcatcaaccaacagatattccaaacctttagcgcaggaaacaaaaaatctcacatcatcaacccaaaccggaaaccagcacctcacacctgccacgatggggaaaacagcaacagaagccaccacacggagcgccgtgttcggccatcacgccacgctttaccagcactcttgtcaggaccacttcaaacacgacatcaacacacccacaaccagacaaaagcaatccttggatccagcaaccccaaccacaatcaatacccgacacaacgcaacatgcgccctaaccagcgaccgcacaccatcctaaaaaacaccagaacaacatcaccatcacgtgactgctcacagaaaaaaacagaaacggcctaatcgcacaccatcctcccccgatcacaccgttaaaacgtctacagcgtcgcaagcaacgccgcaaacgcctgggccgcaacatcaacgtgatgcgccaaacgatgcgtatcgtccaccaccaacaaccgcgctgcacgcgcctgtgcccaagcgatcacctccacagcaggaatcagctcatcacgccaagcatgcaccattgaaatcggcactgacgccgcatccaacgccggcatctgagagatacatatcggcggcaccatcaaaaacagaccgcgaacaggcacctgcaacgacacccgtcccgatatataagcaccgagactagatcccgccaacaccactggaccacgcgtaacagcatcacgcgccaaagccagcaaacgctccaagcgccccggcacatcccccaacagactgacctcccgccgtgcatccagatcactatagtcaggacgcacatgactccaccccaagcgctcagcgacctccgccaacgcagtgactttgttcgcatccggaccactctcaaaaccatgcgaaagaatgcaatgccctcgactcatcgttcctccaccacgtcaacaacacctatcccaccaccacaaacacacccaggccacccaagccacacaccgtgtacacccagcaaaccaaacagtgcccatcacaccagacatacacagcagcaccaagcaccccagacaagcaatatagaggcaacgcaccgctacggtggtaccatcggccaatgtccgccccctgcccccccattcagcaacaccctctgccctacgtcaccgcactacagctacggccactggacaccatcaccctggcagtcattcattgcactgaactccccgacttagcaacagcccgcacctatggcgagcgcgtgctctatccgagcggcaccggcaacagcggccactactatatcgatcgcaacggacacattgaacaatacgtgcccctagaacggatcgcacaccacgtccgcaaccaaaacgcacacaccctaggcatcgaactcgtgaaccgcggccgctacccccattggctagacacccgccatcaaacaatggacgaaccctatccagcagcccaaatccaagccctgatcgcactgctgacgtggctgatacacacactaccggcactcaacagcatcgccggccacgacacactggacaccgaacacgtcccggccagcgacgaccccacgcaactggttccacgcaaacatgaccccggaccgcttttcccctgggatcacatcaatgcagccctgccacacctacggcacctgacaacctaaacacctctacaaccgcaacaacctcagcagcaaaagcaacaacccatgtagtgacgccgccctctcgagggggaacacgccattttcttgcgtaaaaacagccacccatcctgcccctgcaacatcgtgagagtgactgccctcaccgcaacagcacacacattaactatgtcagccacgacactgcgaatcatcgaacacccccactgccactcactccgcgtaacgccccacggcaccgtcacaacacggctacgcaaccatgatgtccccatcaccaaaaacacagccatcctctgtcacagcaatccactacttgatgtgaagctacccggcaatgtgatctgcaccaacgcgacacaggtttgggacagcaaccacacgatcaaacacatctaagccaacaccaggcgtaccgatgcctctgcggtagcactacgccctcctcgccccacacctgcgtactccttacgcttagccacgaacaacattagccccaagcaacgcacctcaccaaaccgaatactgacctcctgggagcgtctttgctgtttcagtctccattgatacaggccgcacctagccatgccttctataaaacactccttgcacacttgataacagccacaagcgctgcaatcggacatttctaatggatccactgcgtgaccctcgcaacgcggcccagatcacaccgacgcaccgacgaccgacaatattgctccgtctgatgcgcttgagagacacccccactgcaaccgacgtgtctcacccaaccaaacccatctcggcaacaaccatacggaaacacctgtcctcaagcattcgaaataacgccccctcgcatggctcacagcgctcatgtccacagcacccttacaaagcagcgcaggcgtctgagcttgcccaagaatcacgctttaaattcaatacgagaccgcactacatccaaccaacggcgcagaacagacatcacgatcagaaaaaacgcacaatcactcaccaacaaacacacccagaaagaatgccgaaaaacccccacaatcatccacaatacagctcccatctctccgggcagccgccatcccctattccaagcaacgctcttggcgacacaacaggacgcatggctcacacccgagacaagcacaagacaagaacaaggctgcaacaccgccccgcatagatcagcaacccgggtttcttggtttttcagaacactgcatggagattcgtttgtctttccaaaggacgacacccattgcgcatcgaccaagattgagccgcacagcaagccagtgcgtatttcatgggttccccctggtcaacatcacgcacagcttgggaacatcacagaggcaagccgcatgactcaccatccctatccacgaccagttctgtgctcctcagcccaccctggatcatcagcacatccaagacctcgacacccgttcctgataccggcctatcaaagatgcaattcttacttgccgctctcgctgcccccgcaccacgctacgccggccttttcaggccgcgtccatgaggactaaaaatcatgactgaacaattgaacattacccgtggtgtcaataacaagccggttgccaccgacctcttgcagcaagcgctccccctcttgcagggcatctgcggtgaagtcttcatcggctatcccttaatcgccacgccagatggcaaatactccattgatgccaccttggtcagcccctccacaggcatcgtgttattcgatttgatcgaagggacggatgccaaagactatgcagaacgtcaggacgatttagcaaacaagatcgaagcacgcttgaggttacatcgggaactggtcaaaggacgtcaatgacaggtgccgttgtcggtgatttcatttgctccagccattcacaatgtcgacactgtcgccattgcgccttatccactcgtcaatgaacacggccttggcgctgcactcaatgcactggattggacgcagggcaacgatactctctacagaatgacgctgtctgcaatagaaagcctcagcagcattagaaaaatgccgctccaagcgtgaagtgcaacgctcagactcccggggagccaagctcaagcgtctggaagattccattgccacgctggatcatcggcaacacaaagccgtccttgaaacagtggaaggcgtgcagcgcatcagagggctggcaggttctggaaaaaccattgtcttggcacttaaagccgcttatctgcacacccagtatccggattggcggatcgctgtcacctttaatacgcgttccctcaaagcccagttgcagcggctcatcacccgtttttgtattgagcggagtggtgaagaaccagactggaccaagattcgggtcatcaatgcttgggggcacccggcggagcggcgagagatggcctttactatgaatattgctgtgcgacgggagcaacgtttttcgactttaggagcgcctcttctacattcggaggcgataaaaaggccttcgatggcgcatgtcgcaatgcattagaagatgctgctgatgctgctgatgccgcaggtctctacgatgtcattcttttagatgaagcacaggacctgccacccagttttctgaagctgtgctacgccatgctcacgccagcaaaacgcttggtgtacgcctacgatgagctgcaaagcctctcaggaacatcgctgccaccgccggaagacatttttggcaaggatgaaacgggaaaaccacaggtcacctttggtgatgatgatcggcgagatttgatcttgcaacaatgctatcgaaactcccgcccggtattagtgtcggcgcatagtcttggttttggcatgtaccgtaatgcgccgcaaaaagccccaactggcttggtgcagatgttcgacgatccaatgttatgggaagagattggctacaccgtgaagcgtgggcagttagcaaaaggtcagcctgttgcacttgagcgcaccccggaaagcagtccaacatttttggaagagcattcggatattgatgacatcgtaaagttcatcccattcgaggatgagtggcagcaagctgtctggctggtgcaacagattcagaaaaatatcgcagaagacgagcttcgccatgatgacatcatcgtgattcactcagatcctcaaaccgcccgtggcagcaccgctttcattcgtcaacagctgtttgaagcagggattcaggcgcatttagcaggtgtcgataccgatgcggacgtctttttccgaaccgatactcgctccgtaacgttcactggcatttatcgtgccaagggcaatgaagccggcatggtgtatgtcatcaatgcgcagcactgtaacggttccggcccagggcttgccaagctgcgtaattgtctttttaccgcgatgacacgcagtaaagcctgggttcgggtcatcggttatggcccccaaatgcaggagttggttgatgaattcactgcgttaaagcagcgccactttgtcttggagttcacctatcccgatgaggagttattgaggagtctgcgcattgtgcaccgtgatatgtctccacaagcgcggcagcgtcttaagcaacgcaagagtcagcttgctgatcttttacatgatctggagagtggcgaactgcatttggaagatcttgatgcagcgagcctggagacactcagaaaattccttagggacaatgcctcatgaggttgactccgcaatgcatcaaaaaagatatagatggactgatttctaaattaattgaacaaggcgtgtgtgacgattcaaacttctctgcgattcgatgttctgggggtaaaacagagattagcttcagcggtgcgcagcatctttccattgcactgcgtgatatcgaatacacggaaatgtatagcgcactcgcagataagcgctcatacaacatgaaactcattgatggggcactgcttcaaatgatgtaccgcctcgaaaacgacggcctgctccaacatcggcttggcttttaccctgcgccacatctgcggcccttccaagatgacccggacacatacgtttgcgatgcgctgtttatcgagattgtggaacgtagaattgttccattcccattacgttttgattttgatgcgcgcgaaggtatttacgttgatggggcgcaccccaaaagtcatctgacattaggtgatgtcacggggtgccgtattccggtgtcagcaccattgacaccgcgttggtttgttgaatttattttgaggcatttttatcaaacaaagcagcatgatttcatcagcggtctgccacaacacagcataaaatttgcaacgtcgatcactcgacatgaagcagatctgatgcatctggtgattccatattagccatcgcgcagcagcggtgatcggccgtcaataaagcacatcacaacgcattactgcggcaatcaagcaaagctgtttttcatcaaaaaatagtaaaaactgagctgattgcaaccagcacaaatgtatgcgctgtaaaaatagaatcgagatctactgatattcgatatgggatatgtagatcccttatataaaccaaagcgatcaactgcaattgagtgacgcagacgcctggcctttgtgacgctgcgtttttcatgcaatgaatgaacacgtgtcttcattggcgcatcagtttgcatcacagcaatgcgatgaactacgtttgtcgtgaattgactgatgattggaaatacaactgcaatccaatcgcaacacatccatattaataagaacaccacgactctgcccccgagcggcacgtcatctctgtttttcttctggaataatcattgcaaaacgcatcaatggcatttagtggatcaatgacgctgtaccgtcggaagcgatcacagtacctcaagcctccattgtctgctgacataaggcagcggctatcaatgcattgacgctttgaggtatgtgctgattccgtccataaacatttgcaccgagattgccactaacaacattcccattaagcgctccaatgctgtcaacacacgatggcccagcagcgtgtacaagagcggcgcggaaaataagatcgctgctgccccaccccaggccagcaacaacgcccagttccaatcccacaagcgggcgggttcgttgctccccatcagcatcactgcggccatgcccgatgggccagcgactaatgggattgctaatgggacgatgaaaggctctccctcagggatttcccccatcaacccttctgggcggggaaagatcatccggataccaatgagaaataaaacgatgcctccggcaatcgataccgactcctgtcgcaagtgcatcaactccaatacgtacttgccaccccataggaaacccatgagtacgaccagcgcaatcagcaattcacgcgccagtactacgcgttgccgttgggcaggcaatggtttgagtacgctgagaaacaccgggatgttgcccaatgggtcaaggatcaggaacagtaacaacgcagcagacataatcgtcatgggatggaactccagatcactcgacggtgtaaaacactcgataaaaacactgaataatgcaagacaggccgatgcctattcggcaagatcaacgttgccacccaccattcactgcaacaacaccctatgtgctcaatacggtacgcattgggtcttcgatacaatcgctgatctgggcagcacacctgcaatcagcgttgtctacggacacccagcacgaggccaacaggcctattgtgcctagatggccgcaatctctcccaatacgctgaactcgccctctggaacatcacccataaagaccacacacgctgtcagcgtgtggacattgcagtcacaggaaagcgttaccgaaccgtcaccgtgtgctcaggtttgggggctctttgcacacggatgctggtgaatcggccagctcgaccaagcaagcacaccatactagacaggataccgtgacttacccaagccgcccgacgaggtctgcatcggtgtggcaccgccgtctggaaatgcctcgcttgatactccaacggatatggaaacaatcaaaacggcgcacggcctggcaccactgcaacaacggcaatcaccacatgagtaagatcactgcggggcctgcggcccagatgtgcgctgcaacctccattcacacccgctgcccacaccaggcaacccttcagtacggtttgctacaacacatatgcactcaagcctagtcagcctcgctgacaatgcgcttcagatcgccggattcaaacagctccaagatgatctcgcagccaccgatcaattccccatgaatgaacagctgcgggaaagtcggccaattggagaagcgtggcaaattggcacgaatctctgcttcggcaagcacgttcacaatatgcaaatgacgagcgccagcagcaagcaacgcctgtgtcgctctgctggaataaccacacatcggaaattcaagcgtccctttcatgaataataccaatggatgctcttcaatttcagcctggatccgctccatcaccaacatacgattctcccaacataaggcaggtcccgtacctgctaatcagatgtctacgacacagggcgacattgtaaccaccgtattcctaacaaggtcccacaccaatctaacagcccctcatgtcctcattttcaccacattctgaaactgcatgtcctcatgctctatgtggaaaggcatgaagtacaacggcaacgcagcaatatgggggcaaacacgtgacagtgacacacctgcaccgggcacagacgctatcctccattgacacagacttcaggcattcacgcagccattcgagaggacgcccaggctttcgcccatcgctgacaccagctcagacagaagaagacgccgcaacggcatccctccgggacacctccgacaaacgctccagcaccacagccacgcgttcttgatcccccagtactgcacccacctgctccagagaagccattaaatccgcaggttgatccgcacgtagtgtggcatgaccgaccttgcgcccttggcgtggctgcttgccatagtcgtgccaatgtaggcctgacacggccagtaatgcctgttgatcaggcatgacacctaagcaattgaccatgcaggcataaccacgcatcgcagtgctaccgagcggtaagccaaatacagcacgcaggtgattttcaaactgggacgtttcggccccttcaatcgtccaatgtccggagttatgcacgcgtggtgccatctcgttggcaagtaatcggccatcgtggacaaacagctctagtgcgaacacgcccacatagtccaatcgctcagccaatacacgcgcataggcttcagccgcagcctgcagcgtcggatcaacggccattggagccaaactgacagagagcacgcctgcaacatgccaattctcggtcaacggccaagaacgaaactgaccgttacaaccgcgcacagcaaggatgctcatctcacgctggaatggcacaaaggcttccaaaatcaacccggttattccggcttgctcacccagcatggcccaagccgcatccgcatcaatcaacgtcttgatgcggaattgacctttgccatcgtaaccaaaccgacgcgtcttgaggatacaaggtgtccccaccttgacgattgccacatccaaagcagcccgattgtcgacagcaacgaagtcgggcaccggaatccccaagtcacgaaacaaggtcttttcacttagcctgtcctgggccactgcgagtacctctggattcggatacaccgggacgtgttctttcagtacttgcacactagcaaccggcaggttctcagagtcaaaagtgatgacatccacccgggcgacaaagtcacgcaacgcagccacatcatcaaaacaaccaacccagagcggcgtcatctgcccagcacaagcgtcaacagtttgatcaaacgtacacacccgcacgcccaatgggggtgcagccaacgccagcatacgggccagttgcccgccgccaagaataccgagggtcttcattggcgtggatcgtccgcagcattcacctcatccgtctgacgttggcggaactcagtcagcatccgacgcattgctggattttcgggtaccaacagcgctgcggcaaacagggcggcattgactgcaccagcttccccaatcgcgaacgtggctactggaatacccgccggcatctgtacgatcgataacagcgaatccaaaccattcagagccttggactgcattggtacccccaacactggcaccatcgtcttagcagccaacatacctggaaggtgcgctgcgccaccggccccagcaatgatggcacgcaaaccacgcccttcagcctgctccgcataagcaaacaatttatccggagtacgatgcgccgaaacgaccttcacttcatacgcaacgccgagagcatcaagcttttgtgcggcgtgctgcatcgctccccaatccgaagaggaacccatgacaataccgaccagcaggggggattgattggagatcatggccctaacctatcgcaaacgcgtattctagccatcttcccggttaagatcaggcattcctgatggatcgcaaactacttcatttgctgtgctcaccagatacccgccaaccgctgtccttacttgagagtaaagggctggaagccctgaacaaggcaatcgctagcggcactgtgcaacgcgccgacggcagcattcaaaatcagtcattacatgaagcgctgatcactcgtgatcgcaaacaagtgttccgaattgaagacagtatccccgtcttattgcccgaggaagccatcgctacgatacagatcgccaacttcccagataaataaagaacctccatcacgacaattaaaacactctcactgcagatggatacctttgaagaaaccgtcgcagctcccccttcatccggcacccatcccactcattcagcttaaacacgagtcaaccaacacaaacacccaaacgagaaagatgtcaggcaatacgatattgacggcagcaggcacacgttgatctagatcgaatctacattcactaaaaatgccttcaaaaatcagtatccgccgtcaccacgatcacaatagtaaagcccccatgtacagcagtcagctcggctggtgattgaaatctccccaaggaaataacttcacaaatgactggaaactaattgcggaaggatattgaccaacgtccaagcatacccagcctgtgaaattgaatgtagcgcgttacccagcccattcacccctacggaaccccaaaagcaacgtcaatggcattacacaaatgcgctgtaacgctacgataacttacggccatcgcagtatcattggctccgttgtggtcgaaacaccaatgcccattggtattcaaagcaactgaaaccatcaacgagatcaaagataatcacaaaatgattcagtcaatctgtttgcgtcccatccatccaagaggatcgatacctgtctccacgttgatgcatctaatgccgatactcatcgtgttctggctaggcacctcccaagccctggcggtcgaagtctgcgaattgccgccggttaacagctcttctcctgctgcacaagccatcgtacgcactgcctgtgaggaacatcgactatggggacaaccattcatcaatcgtcacggacgcattgccaagcttggcatcacagaatctgaaagcgacacgctggccgatcaaaaatccattgcttggcaacaagtagcgctttactggcgtgagagcagcactctagcgatgacggacagcgcgccaggatcctctagctgtgtcgcgctagacaacagccgcaacactgccaacgattgccgcgcattcctgcttgacaccccctggtcagcagcatttatatcctgggtcatgactcgcgttggtctcgctgggttcaccgtctcaccatctcacatcacctacattcgcgccagttatcttgatgcttcctcgccataccgtttcaccgacccaggcattgagaagccaaaagccggagacctgctatgccggatacgcggacgtccgcccgtcggctatgccggcttacgtgccgcgctagacgctggtagaaccgaggattggctcagtcactgcgatattgtggtcgctgcaaacgtcaacggcgatcgcacgctccacctgattggcggcaatgtgtccaatacggtgatgatgcgcaaactgccgttggatcgcaaaggacggctgcaactgtcacgactacaaccgaatcaggatcaggaatgcaccccagcgcaagaaaataactgtaattccaaccgaggtgattgggcagcgctattgaaactgcgtcctgacgtagcactggcaccacctgagagccaaacagccacaccctctagcacactgttgcaccaatgaatacacactctccccacaattcacgccacaagacatagactaaaaatcatggaagaacaatgagatcaatggcaaccgctactgtgcttgagtgatctgcagcaaataatatcgaacaaaatatctcaacggcaaaagaaagtacttgaacctcttttgcctaagatcactcaacgtcgtttaaagcaaacgccttttaaattacgtgtctataggtagcctgaaacttgataaaaatattcaacatgcaattgccctactttgaaagcaatttcccatcgtcctactgtcattgcagtcatttttgatactcatattaacaatccagctatcaacacattccgtgatagataggacataagctccacacggcataaggtatacacaacaatacagccattcccatctttactatcagacaagccgacgacgcagcgtaagatggcgcgttgctgttattcaagcggctcggatcgcccaatcgcccattacacgtactcatggagcgcatcaatgcaggccaccaacaccgagcactagcttgacttgaacgacctgggcctctccgtcataccagcactgcacacgtgtggcgaaccttgaacacacaacgacacgatgacctcacaataagaacaaacgcaagagcacctgtgtcacagacttaatggttatcactatatccactcaaagatacaagatacccgatgtcatactcatcggatttatttacttaattctcattatgggtggcttgcaatcgtattacgaagcgctaaatggcttgctcaacaaataccgttatcatgcgagcatccatcggttgcagatcatgtattaacggggtatttaaacaccatcatatcgtgattattttctttttataaaaataccgcaatcaacgcatcaaaaaggcacagttcccgcatgcttttaaatcgcaggctacgccatcacatggaaaagacttaaaactcacctgaaacctacgaggcttcaggtgagttaaataatgatgataaaatctttagatatactcagagatctttcaattaagattctaatgcaaatctacattatcctgcagtgagatagcaattttctccatcatgccctgatcttcatgatcaaggatatgacagtgtaaaacaaattctcctatatatcgttgataccgagttcgaattataaatcgatagaaatttttagggttcttcttcaaatcacccggtaataaatttgtttttacaaggatagtgtctttccattgtccttttaaccctgaaaattgagtatcaccatcagcctctacaacaccaggcgcactcacatccctaccttgtggatcataaatagcgacaatctggaaaggattgacatgtatatgataaggatggctaacactataagaacgcaactcccactcttgcgccttacctagaggcagattcaaaccaagcttgttaggattatagatgaatggcttgcttggtatatagacaccattcactcttttaacagagaaatcatggctcaagacaaatatattatttttatccggtcctggacctacaaagaataatagtttttgtttcgactggtcttgaacttcagtatcagcaatatcgataggatgtggcgtaaactttctcaggagtatttcatgatgattatccttgccttcagcgtgcgcgatatctttaatcacttcttcacgaacattctctggcataaatttctcagctgactttattagcttattaacaagcactgaggtgattgcgtttgtagggatattatcttttccagaaacagagacaaagccaagtaaactctgaggtgaggattcgctattaatactaccggctttgggttgttgtggttgtataatgcaatatccacctgaggaaggaaataccgttagtaaatcataacgatatccgggttgaagagtcactttctgactattgatagtatgactcattgtcaatccatcggctgctacgatctggaaaggaatagtttctccagagcaaagctcctggactaaacgtcccgcatcctctctctttaaatgacctgtataagcacgcttatgtaattcattcaagttaatattagggttgatttttcgaaatgtcatattaattgtttcacgcacaccggcatgaatcaatctccaacgctccacttcacccacttgtgatttaaacgttggtagtacaatgccgttgatacttgtccaccgaccggaagcaggccatgtgcccggcccaaactgatcataagactcaatgacgcccgtttctcctggattacagctccagttaattgtcccatcttttttacgttttaactttccatcattacctcgacaggcgtaagcaatttgctggaaaagcaccgtatgttctttgtaagatttccccgtctctggatccattaataaggtacttaaatctccatttgaggtcggcgttggcttacgattgccacgtataataaaagcaccggccataccgctagacacttgtaaagcagtagagccatggcgatgagggtggtaccaaaaagtgccctctggaatatcattagaaagatcatactgatactcgaagttaactcctggattgattgacagaaggacattatcactatttcctgtcggactgatccacaacccatgagcatgcaaattagttccattgaaacaatgaggtttatcggccaatttattggctgtcacttgctgttgcattccatggttattcagacaactcgcatcaggaggtaatctgttttttaataaaatacggaccgtatcaccaggatgagcctcgatttgaggagcgacgaactgattaacttgggttacacgtttattattggcatcttgaccagtatatccgcgcaaatgaaccttctggaagctgtttgatgagggatcataaaacttaccatcaacatatccaatatttaacacataataaacgtcgttatgattatttggcgatttttcgacaccaaaatgattttcaagcatctctctaagagtactctttagagatggaggttctgagaataaaagagattcaaatgcatctttctgattattcactacatcattctttttttctgcagcgacagcctgcaaagacacgaaaagaacaatgatcagtaagaaattgcgcagatacaatgatagagattttttttgagtattcattaccttgactctttgaaggtggctttattcaaaatcaataattaaaaaatcttactccattcaaaaaaacgcctaaactcacttaaagcataactaatcatagaaaatcataaactacgcgccacatcattaaaataattatattctcacacctcatacattatgcaagcatcacgccccacatattcctctaaagaaacacatgagaagagagaaatgagtcgcaaaattagaaattagaaaaaatgccacaaaccctatcaaataaacctgagcttaaatgacatattacttctgaaaaagtaatccataaaaccatgcgtactgattcgacataaccaagtaacatcaagatataccttgatgtatcccaatctattaaatgctatataataccctaacatttaacatgaataatttctatagcattagccatccataccaccattaaaaataaaactctcaatttcgagagataatcaacgcataggaattaaaacccagacaataaaatatactttgaaatgaggcattattcgatagatcttcatcatattgatgaattctaatgtcaagaatagttagaagcatacatcatacgttattaattttcttgcctataattaacaaaaacaagtcagaaaagatcaaacaatcaaccagcaaagatagctatatattttctatacatgtatcaaaggttctcaatatatctgctcacaccgctaaatgacttaaaattcaaatagcacctcaatccttgtcacactctatgaatttaagaaagtcaaagtagctagaacccaaagaggtctagacatcattcaaataatgagtgatatgtaccagcttgcttgataattcacagagtatggccaacatcaggttgcacagaaacagataaacagtaggatcattgatttaaacattaagaaaatcgctctactaatagcggcaatacggatatgtaatgtgatgccataaatctatcttgtaattaatgataatgaacccaccacaaggtaaggctgataatcgaagcaaccgacttcattcatgctgatcagcaatgagtcgaataccaatccccaggataccaatgactgttgcgaccccacacatgatttcgaacagatgtccaagctaaacatctgcggatagatatgcttagctgtgtacctgggttatgtcaccaaagcagataagcaactgtagtaaataagatcaaggtgcagcttccatttgcgccaagatagttttggcaacagtttcataatcaccattaaagtgatgtgtgcccggtaaggcaacgcgacgattctgttgcggtaatgatgggcacagtgtttcttgatcatccacgccatagatacacacagttcttgtggatctcaacttgaccatgtctggtgcaatcggtataccctcgtcgtctgtggatatccagttgctgacatgaaattcgtagtgcgcatattttcctaacgacaacagtgcagtcatacggataatttggcgagtgttgggggaaagcttattaatcgctgcaggcagcacgtctgcaccttgagagaatccgaccagcaacaagcggttacgcttccagtggtgagcgtaaaagcgtgcaatgcggtccagatctttggcaaagccttccggggtacgttcgctccagaagtaccgcagtgaatccaagcccactactggaatatcagcatcggccagatgtcctgccaccttcttgtcgatttcggcccagcctccgtcgccagaaacaaagattgcaaaggtgtcacttttcttttgtgctttactcggcacctccaccactggtagtccatccagatcagcaggcggtggcggcaaactcacacctttttgtgcgcctaacacgcgtagcgctgcccgtaagcggggcagtagatcagcacttgctgcaagtctgatttcacgcccaagcgcgaccttacggacgaacccgctggtcaattgcgctggacaatgcgcagatgagaccgtcatgacaagtaaaggagcggcaactggcgccggcttgagatgctgatcactcgccacaccagccccacaaaccgcctgcgtaggcaccactaccggacacaatccatcactcaccacaccagcaagtatattttcagttgcctgtgcagcaaccgcatagactaaccccgagccatcgccatcaccgactaataatggcaaccgatatgttttatctcgatagtaagcttgcagataacgcgacagattctcgacgtcgccgacagaaaatgtacagtgattagaatcagcagcgagcactttatacagatgcgtcgtatcgaccagtgcaaccattgccccgtcctgtcttaatatttccgcctgacgggtacgctggtcaacatgcccagcatcactgaaccagatcaccacgcgctgtggctcaccatccggacgcaggaccgggatctgctcgaacctgccatgagtgatcttctctggtttaggctcggctgcagcagtacccgccaagacaagcagagcaatgctctgtaggactgagcggattttaaattgcttcatgcatgcatactccaggaacaaggttactaaagatacccgataccacatatgatgaaagaaaaatcaaaataatcatgaatagacctatggatagcactgtgaccatttgatataggtatgggatagccttttgggtcttccaaggtaaatccacagcgaacaatcactattgcattctgcttgcagctcaagtgacatctaaatctgtccaggccagccaaagtcgaatacacggaatcactcagtccaatagcgcctgaattgctgccaaaccagccttagcacgctcctgtttacgttcggcatcaaccacgggatcagcaccatcgcgctgtaattcctcagccggcagttcatcgaaaaagcgactgggcttaaaccgcacacgttcaccgaagcggcgcgcacatttgctatagctcatccacaactgctctttggctcgggtgataccaacatataataggcgccgttcctcttgcacattgccttcttccaagctgacttcatgcggtagcacgccatcttcgcaaccagcgatgaacacataacgaaactccaatcctttggaagcgtgcagtgtcatcatgcgtacctggttaccgccatcgtccttatcattgcgtgatagcaatgctagctgcgaaacaagatcgccaacactggcaccgaaagggccgccttcaaaccattcggccagttcctctacattgcgcttacgccgttggtaactcgcttcatcattggactgctcacgcaattcggtaagtaaaccagaaacttcagcaaggcgccgcactaactcagccgccgacacacgtgatacttgctggcgcaactcacgcaagatatcagtgaatttattcagaccattggctgcgcgcgccggtaattgttgcaacgcacccagcgactcagccgcacgcgacatcggcatttgctttgccgccgcaagttcagccaatttagccaatgaggtggaaccaacctcacgcttgggtgactgcactgcacgcagaaatgcggcgtcgtcatccgggttgaccaacaatcgtagccaagacaacaggttcttcacttcttgacgttccagaaacgcggtaccacccgtcaagtggtaagggatacgcaataattgcagtgccttttccagcggacgcgattgaaagttacctcggaacaagatgcagaaatcactccacggtacctgcttggcatcccccaaataagagatttcccctgcgatcttttcggcctcatgttcactgtctcggcactcccaaatacggatgcgctcaccgtctttctggtcactccacaacgtcttcagatgcgcatgtgggttatgtgcaatcaacgcattggcagcacgcaacacacggttgggacaacggtagttctgctccaacttgatgaccttcaactgtggataatctctctccagttgcagtaagttctcagcattagcgcctcgccaagcatagatgctctgatcatcgtctcctacacacgtgaagttgccacgcggactagccagcacctttagtaatcgatattgcgcatcgttggtatcctgacactcgtcgaccaacaagtaaccaatccgttcacgccaagccatcgcaacctgatcactcgtttcaaggatctgtaccggcaggcgaatcaggtcatcaaaatcaacggcgttgaacgctatcaggcgtgcttgatagcgtgcatataacgtcgccacctccatctcacgcgtggtacgtgcagcagcaagtgcttgttcaggtgacagaccagcattcttcgcacgggatatccgtcttttcgtatcatcaatcacatcctgtttggctccatgcaacaggtcattgatctgggcatcagcatcatctgcatcgaacaccgagaagccaggcttcagtccaacggcatcatgctcaatctgcaaaaacttcagtcccaatgcatgaaaggtgcagatcgtcaatccatcagcacgactacttttgatctgcttcgccacacgttcacgcatttccttcgcggacttgttggtaaatgtaatcgcagcaatacgtttagcaggataacaatctgaggtaatcaagtacgcaatcttctccacaatcacatgcgtcttgccgctgccagcacccgcaagcaccagcagaggaccttcacggtataagaccgcagcacgttgaggagaattgaggccgtgcataagggaaacgttttccggatacgtattgtaccgatcagtatatggaaggccatttgcttgtgacacggcatcggtattgattactaatcgagcaagggattgctatgctgcaatgatgcgttgtaagtacgatgacaggcataggagctgtctcccccgtagatatttctgaacatgttaaccacgcatgtcaggaccgcaaaaaaaatcactttcttacatgtctgtattgatatcagatggttagaacacaccagaaaaatgcttgacctgaacagttacatatttttcagtcgacgaaagccaagatgctgctgcctacgctacgattgcctggtattaattgagagtgtgcgggaacagctatttcagtcaggtggtcaagtctgggacacaagcaagatttcataaagatcaccgttatcaagtcagcggaactgcgagcacaactgatctatacacacaccaaaactgggctacgcatcaagtgcagcacatgccagagactcgaagcacatacaaaattgaagcgcatcagtcaccaaagtaaaagcaagcggaacgttgaaaaataatcgccaatggaaacgaaaaccattgcacactgaacacatctaaaacatagggaaatctcgatttagagcacttggcggtacattatcaatgtggagactcatttcgatacagtccgccaagaaaatacatctgtgtttgaatctcactataaaaatgaacttaactattgcgatagttctcgacatcacccgcaacgttacggaatcaagtcatcctcagcataccgtactgtcgtaatcaatcttcatccgattaatacatcttgcgctcctccaatatcggtggcatccattgatagagccacgtttctgtcaacggctccccattggtatcacgcaagtacaaacggatgtcgatctgttgagtactgtcctccaagggcactacgtcgaacatgacgcgatagccacggatctcatgcaatggtcgtgccgacacgatctcagcgcgaccgcgtgtcatatgcagtactggttccacactcacatcatgaacactggccagggcagccaatttgccaccaacaaaatccacagcaaaccgccacgagaagtatttgcgcttctgaccaaccacaccacctaagccagtacgcgtcgccacacaatacgccaacgaagaagacaccggcggcagccccccccaatacaaccgatacccaaacagtagttcctgaccagggtgaggcttattccgtggattccagaaggaaacgatattatcgaacgtctcatcaaatgttgggatctccaccaactggacagacccctcaccccagccatgtttaggctcaacccataggcacggacgcttctcgtaaaacacaccatcgtcttgatagtgatcgaaatcacgatcacgctgcaaaagaccaaaaccgcgtggattgttgtcaagaaacatgttgaagcgtagatatggcggattacataggggccgccaaatccactcaccattcccggtcaaaagaaacaatccatccgtgtcatgaatctctggacgccaatcccaacccatgcgccgatcattctcacccacttggtacatactggtacatggagcaatcccgagtcgctcaatggtttcacgcggatacaatgcgctgtcgatgtccatcagtaggacatcaccgttagtgatggaaaaacgataagcgccagcaatactcggcgaatccaaaagtccatacagcacgacggtatccgcatccgaagtcggctgctcaaggtaataagcgataaagtccgggaactcttctggtccgctactccctgtattgaccgctaacccacgcgcagactggccgtactgtccctcctgtcccacagcgcgaaagtagcttgcccctaggaaggcagcaaaatctcgatcagtatccttacgagtattcaatcggaatcctgcgaaacccagatccttgggcaacctcttcccatttaagccactgctaccatagtcaaaagccgcgggatcataagctaactcctgcgccataccatccaccacttcgtacatccgcaccgggctatggaaatacagaccaaggtggaaaaacttgacttggaaatgagcatcactatcagcccacaatgcatgatcctggcgataacgaattgattggtactgatcccaacttagcctctctagtggtgtcggcaacacacgtttacgtgaatgataaggcgccgcagcgagggcgcgagcgtgctcctttaaccattcatagtcaaaacgctgagattgacccaagcgacgcaaagcaatcaccctgttggtagcgaacggtcccccaagagggttaggtaaaccaaacgcaacccaagcagcagtaacgctttttaagaaatctcgtctatacatgagcaaagctgcacaaaatatatgtgaatcataactgcagcagaatgaggcatagatcgacaaatgaacacaataaacgatccactggccagtcaaaaaagtaaagacatacataaagagtaatacccgcctgactcatcaagcaaggagagaacaacactacctaatactcgtatgcatctcccaaacaccagaatgctagctgtcaattgtcagggaaactcctcggaagcactacaatgaaatgctaatgacaaccacactctacatcttgtcaaggctgacataatgcttaaacaatcaatcgaagatatcttctcaattgcagagtttcatcaaacaatgccatctatagcaccgtctgtaatcagtcgctaatagcgcttactcaacactgtaaatatccagaaaaacttcattaactgccgctgccgtctgcgaacgtaacatcatgctgtgggccacttgtcacaagatcaccaactgccacttccccgcaaaattcatggcatgcaaaaactttctgctggtttgacttgtccagatagcaccacagcacacgtaaaaaaatcatatcacgcagcgccaaagccattgaatgaaatcagcctcttacacgccactcctcaaagagacaaaagaagattccggtcccaaagacagcacacggaatcaaacaatcgcaccatagggcgccacaaactagctaaagtccacagaaacagtaaaccaagggtttgactggaagcatgcccgttttggcctcacgcactgcatcttcaacaaaacgcaactgcacctcggtttccggagaaatacgggtgagcagcacccgagccaagcctgaatctcccaatgcccagttcccaatccgagtggacatcatgttgatgatgaactgcataaatgggctgactgccttatcaacataacgcacactgtagtggccctcgccaagcttggcacgctttgcagcatcagtaatcgcctcgcgcactcccccgagttcatcgaccaaaccacgttctttcgcctgcgcgccgctccatacacgaccgcgagcaatactgtcgatctcttgcacggagcggtgacgcgcctgcgcaaccttacttgtgaaatctgcgtagcctttgtcgatcacattctgtagcatctgtccaacctgtggatccagcgtacgagtgatatcaagcgcacctgcaaaacgggtcgtacccacgccgtcagtgtgcactcccatcttatccagcgtacgagtgatatttggcatcaggccgaagataccaatcgaaccactgatcgtcgatggatcagcataaatgcgatcagcatccatgctgatccaataccctccggaagcagccatatcacccatcgacaccacgaccggcttgccaaccttcctcagtgcaacgacttcacggcgaatctgctcagaagcgaagacttctccaccgggagaattcacacgaagcactaccgctttgaccgcgtcttcatcccgtgccttacgcaagagcatacttgtcgactcaccaccaatataaccggcaggctgatcacctccttttatttcacccgctgccacaacaacggcaatctgcgaggacgtgcctagtggcacactctgtgcatccagcaaacttaaataagtaccgaagtccacattacggaaaccaccatcggcctttttatcggcaacaccacgctggatcattaactggttcacttgctcgcgagttttcaggccatctaccagtttctgcgccaatgcatacttggccaaatcaccatgattagcagcaatatcctgcggcagtctttcgactatagtattgaggtgcgccgaatcgagcttacgtgccttagcgatatcggccaaatagcgttgccatatatcgttcatccaaaacagatcggcctccttggcatcggctgaggccgcatcaagaacaaaaggctcagccgcggatttgtattcgccgacccggaaaagatgaacatccacacccaatttttcttgtaatcccttgcggaaatactgacggtagtgagccaaaccctcaagcaaaacactacccattggatccaaataaatctcatccgcctgtgcggcaagcagatactgtgactgagtcatactttcactgaaagcaactaactgtttccctgaacctttgaggttctgtaacgcagcaacgacctcacgcaatgaggcataccctgatggctgcaacttgtccaaatccagcaggacacgttcaaccttcttatccttagccgcagcctcaatcacacggatcagatcacgcagttgaacttcctgcccactcttatcacccgtcgctttggctaatgcacgactgaccggatcggcactgaactgttccaccaatgtgccttgcggcccaatcaatagagtcgtgcgatcatcgagctgcttgcctttcaagccatgcgtcactccaattaacatcatcaataacaagaaaaacaagaaaccgaaaaacaccaaattgagaattaaacggcgggtaaaattcatcgctccccataagccaataaagaaacgggcaatgggatttctaggcacagactggttcatgaaacgctccttgaaaaactgacatcattttgaacgcggatcaacgcagcgggtgtcagcataaccgcgctgtgactgacaattagggaataccggcaaacatgcgctcgctaaccacacgaaatcgccaaccaagcaacactgcagccgcagtcaagccaatgattaagccgatccacataccgcgagaattccattccaaggcaaaaccaaggccaagaccaagcggcatacctaaaccccaatacgagatcatcgccagcagcatcggcacccgggtgtccttcatcccacgtaatacgccggacgaaagcatctggagaccatccgggaactggaatatggccgcaaacaacagtaatttagaagccagagacgccaccaccaaatcatccgtataagcggctacaatcacgtcatatccgagcaaaagcacacttgctgaaagtgtctgcgtcccgatcacgattgcataaccagcccaagcgacacggcgcatcaccaaaagatcgcaacgacccacagcatggccgattcgcaccgtggttgcctcggctacgcccatcgggatcatgaagcacaattgagcaacactgagggcaatttgatgcgcagcaatttcatcagtaccaaaccgaccaatcagcaatgtggtgacaatgaataatccgccctccatcaaaatactaatgccgatgggtaatcctatattcaacagatcacggatacgtgcccagcacggcaattccagatgcgcaaatagctgcagatgggcgaagcgacgtgatctccacaagtacaacgcaaatacaaccgcctgtagccacatgaccatcactgttgcgatccccaagccctcaacaccatactcggaaaaaccaaaacgaccgtatgtcaacgcatagctcaatggcaccagcactagcaacccaccaaaacccagaagcatcgttggaaaagtacagtgcattccctcacagaaataacgcatacagaagtacagagggaatgccaaactcccccaacgcactacatgcaaaaacttagccgcacccggcacgatatcagggacgataccaaagaggggcaacaaggctggcaccacactgaggaaagtgaacatcaccaaccccaacagcatggccagccacaacgcttggcggaacaaaggcccaatgtcccgttcacgctcagcaccatgcaattgcgataccaacaccgttaacgaaatcaacgtacccatcggtaccaacatcggcaaccaaagcaatgcagtcccgatagtcgatgccgctagagtgacggtagagtgatgaccagcaataacgttaagtacgaagccgatcagaccagtggaaacgtggcccaaaacaagcggcagcgcaagcaaaagagtaggacggacttcggaaccaaagcgggatatcacaaacgagactgccataaagcaaataaaaagagcgatcctgaaatcgggcctaggtaaaaacactaggcatttaggatgcgcgtaaaggcgtaatttagggaaaatatcacaattccattaggcaatgggtaagccaaggaaggaaaatctattatctcatccagaaattacaatattcaaatataaacaggagaatttcaaaagggctatacgccacaaaaatcaaagcaaatctaaagatgtcttaatgcctcaaaatcggtatgagggcacgttatgtggttttgctttagatattaactttacaccatataaattctttatcactttccccctctagcgtcgcagccgtgtccgcaaccatgcatcacgctcggtcggtgtctgtgccagcaattcccgacgcagtgcatcacattgcgcaggcggagtatgctgaaccagcgtcgccaactgcgccaattggacatcatccaaatcgtgcagcaacgccaaaagtggggtccgctcggactccggcacgtagccaatcagcggttgtagatgcgcatagtgtgcacccaagcgcggacccagcaaccaaccgcggctgtacatccgatctaatcgagcgaaccgtgcttgtagtgcctgctgttgcattggcgatagtgacgcaattcctgacttagccttcagaatacgcacatgctcatccggcgccatagccagccaagcgcggtaacgcaagcgcaaatcagcctgctgcgctggagtcatatgttgccaacgcagtaatttctgggcagaaatagacgcaggagatacagccaagtcctgtgcttggccacggatgcaaactgcagatgacacaaccaatagcacaagaaaacaacaatacgttcgacaacgctcgactctggtcattgacgattcccattgtgccgaatgctaaaagctaccaccggagctgaatcagattcatctggaggtataggctgaccagctacgtaccaagcaaaaaaatctgcctgacgcgccgcttccaaggcactatcttcaagcatggcgcgatcagcaagatctggcgatatcacctgtggcggcgccgacgatacgtagtctggcagtacttcgataactactggcgaatcttctagaagaggtaacacggcaggaaaacccttggagacagattgggactctggcactgaccatatatgccgattccaagcccaattcaacatgaatatcagccccaaggccaatccggctattacgacccaattccgctcaaaccttatgggcgcagggaatcgtgagacagcagactcagcaacactaatcttgggtgatggagacggaagcacagtcgtcgtgacaagacgcttgatggatagactccgtacccgctgctgagccgcttcggccaatgcgcgccaagccgctgggttaggacgaccctgcacgtcacgcggacaggcacgcgctagcgcttggtaataagtttccaacggcttccctaacactaccgcagcctgagcctcatccaggccagcaacgattcgcaacagcagcgcaagccgatcttctactgccatggcttgcaaggacgccaactcttttggccagcgttgccctgtaagaggcggccgacgcagcactggggcaccacacagcaaactccaaaaacgtatcgaccattcagcaaaggggcaacctacagcctcagcaccgaaaatcctgatggcagcaggcaacgccgcctgtgccgcagacatggtacctgtctgtaattcgacaagtacgacggcacgacgctcaacaccacgtagaaaagccaatagtgcagcgggagaagtaattgcaactttgggaacagcggtcatggatactccagtatccaagcatgatagcggtcaatagggggcagacgacctcttaaagcacttttgatctagcactcccattccctgtattgggctcaccattaaagtaggttgtacacagcgtaagggcttgacatagagcaccgtttcagaaggcattgattccctacatcgcaaccataccttgtcactaagtgaatgatccaaaagaaaaaaaaattatggccattttttgtccaatccaagcaaaaggccgatggcagcactctcacagcgtgtgagcacaagagaaatccacagcgttatccacaagcaatgtggataacgcagtttcttcaaatagaacgataagttaccttttgtttatgagaacaatcacgagaatagagatcaaactacacactctgttatcggcatctgatcactaaaccttctccatgccccctacgatcctacgtgtggcgttgccaatccctttaccgcaatgcttcgactatctgccgccaagcggcataccactcccagattcaaccttaggctgccgcgtacgtgtgccattcgggaaacgtgagctgatcggtgtagtggtcgaacttccatcagccgaaatgtcggtaccattacgcgaggcattcgcctggattgaccgtataccaattctagatggcgagctggcacaatcgttacagtggctgtcacactacacgcataccccactcggtgagatattagctacggctcttcccgggctgttacgtcatggtaaacccttaccagagacctggacctgctgggcttggcgtctaaccgaaaccgggcgcactgccgctcccaagctgcgtcgcaacagccgctcagcacaactggctgaattactcaccaccagtgatcaaacggaagatgcacttaacactcggatgaatcactggcgcacagttgcacgcaacctaaccaagcgtggttatgtcgagcgcatcaagaaacctacaaccgtatctctaatcatccagaccaccagcaacaccgtacctgtactcaacactgaacaacagaaagcagttgagacactaaacgctaacgtaggcttcaaaacttatctgctagatggagtcaccggcagcggtaaaacagaagtctacctacaagccatcgctacctgcttagctgcgagtaagcaagcattggtcttagtccctgagatcggcttgacacctcaacttctaaccaacttccatgcccgcctcggaatacccgtgcatgccctgcactccaaattggcagacaacgaacgcgcccgcgtgtgggcggcggcccgatgtggcgaggcacgactggtactaggaactcgctcagcggtgttcacacccctacctcatgccggactaattatagtagatgaggaacacgacacgagttacaagcagcaagacgggatacgttacaacgcgcgcgatttcgcattggtgcgcggcaaagcactgaacgtaccagtcatcctcgggagtgccactccgtcactggaatcactgtacaacgcgcataacggacgctacaagcacctccgcctcacctaccgtgccggtcaagcgtatgcccctcaggtgcgcgtactagacgtacgcaaaagaccactgaaagacggcctatcacccgaggtattaacaggcattaacgcaactttagcgcgtgatgagcaggtactcgtattcaagaaccggcgcggctattcaccagtgttgctatgtcacgactgcggctggaccgctacctgtcagcagtgcagcacatcagtgcaccgcacaccaatgactgtatacaccggcggaacctacttacagtgccaccactgcgacgcacgccagccaatgccactatcatgcccagactgcggcagtacagcgctacagccacagggaataggcactgaacgcctagaagcacgcctgattgaggctttccctaaacatcctgtggtgcgtattgatcgcaacacaacccagcaccgcgacgcactaaaaacccaattcaccgaactcggcaatgccgctggcattttagtaggcacccagattctagccaaagggcatcacctaccacgcttaacgatggtcgtcgtcgttggaatcgacgaaggcctattctcagccgacttccgcgccactgaaaagctctcccagcaactgatccaagttgctggccgcgctggccgtgctaaacatgccggagaagtctggctacaaactcaccaccctgatcacccactgttgcaaacactaatcaacggcggctaccacacctttgctaatacggagctacaacaacgccaagccgctgggttgccgccattcgcacacttggcactcctgcgtgctgaagcgaaagacaccacctcaacacaacaatttctcgccacggtacgcaaacacattccaatcgacaatgcagtcgaatgctacggcccaatgtcggcccccatgccgcgtcgcgccggctacgagcgctaccaattattgctgtccagctcccaacgtaacacactacaccgcacactcaatgtcttgataccagcgattcatgcactgccagaagcacgccgagtccgctggtcgttagacgtggatccagttgatctttactaaggtaatacttccaaagatttaacaaaaaaataaaaataataaaccggcatcacccaaaataaaaaattccaaaaaattctctgataaccaacaacgatggtacgctactaattaatacgcacaagcctatctacacgaagttcaacctctccagatataataaagctctgtatggaaataaaaaaaggagaaagatatttccttcgttacatttacaaatttctacaaataattaccgcataagtatattactagctaacacaaattcagatttttttaaccaatcaaataatgctcgatcatccgcattcacagcaaatctattgaagcagcgatcatcgtcaacctcaaaatattccataacagctatcgtagtggaagtactgatcttaaataatcacaaactgatgcaataccacccagcagacttttatactcaacacaatcacttcgttatttacacatcaatagattagctgtgttgaccagcagggatatataatccacaaaattaatcatcattacatacatcaaaaaagcactgtaatacaccatacttgtactgacgatataatcatggcacttttattattatccacactgtggaaatcatgccttaatgtctgcattatactcaagcgatcaggtatcgaaaatcatatcggatacggtatatcacaaattcacaccgctcctatcttgcaagatgtactaccacaatgcatcccgggcggcatcaatactagtttcactatcatcttgccacctctccatttaacgaaattgtatctgacctatccttccacagaaacaaaaaaactagcaagacatgcaacttaactcatcttcacgatcatcgggaaagatctgataggaatcaagttagtccaataccctactagataaaattccacaacatatgttccaaaacgagttccaactcattggccaacgccaaaccaaagatgtagctgattgaagcacaacatcccgtaccagcatcgctcccaaccccatgacccactctgaaaaacgtagaatccccctagagcgcttcgcggcagaatgactcagtgacacacagcctgctaaagcttctctgcaagcgcttcgtaatcctcattaacgtactcttgacctacaacgtatagcaagaaggattttcagaggacacactctaagaataaaaaagactaaaagcggatcattaatgtcaattgaaagaggggattacaagcgactctacgcccagttatttatctgaatcgataatttctactcaatttcggaacatcgtgctgcaaatgcttttcttatctctataattaaaagcacgcttagactatcctcagccaaatttacgcataccaagaaaataaacagacatttatcacactaagcatcaagaagatccaagcatctaaaaatacatacaagcaacagccactttgtagcctgtgttttgaaacagagcattcaagcagcgaacagcgccttcatttttttaagcgcattagcttcaatctgccgaatacgttctgctgaaactccatattcttcagctaattcttgcaacgtgattttcttatctgtttccagccagcgacgctgaataatatcgcgcgaacgggtatcaaggacagacaaaccttcctgtaacaggcgtaatttggtttcctcactattaccacgttcgtaagcttgagaaggatctccatcattagcaatcaagtagccaacaggcgatggcggagcgttgtcttcctccggcgcgtcgaaaccaatatcgcgccctgacaaacgcgactccatctccaatacctcacgttcggagacgttaagatccctagcaactgcactaacttcctcggcattcatccagcccagacgggttctagatttccgaaggttaaaaaacagctttcgctgcgctttggtggtagcaactttaacgatgcgccaatttttcaaaataaactcatgcatttcagcgcgaatccaatgcattgcaaaagaaaccaaacggacacccatatccggatcaaagcgcttgacagctttcatcagaccgatattgccctcttgtatcaagtcgcctaaagacaggccgtaaccgctataaccgcgcgctacccgaacaacaaaacgcaagtgcgaatgcaccaactcacgtgcagcatctaaatcctgttgatcacgataacggcgagccaatagctgctcctcatcaaccgaaagtaccgagatctggtgcacggcactgatgtatgcctccaacgaaccgagggcatttggaacaggcaagttgtttcccacaagcaccattgatgtatttcgagtcatactgaagtatcccaaatcttaaagtaaccacacagtgacagctatacgtttaaaatgaacaaatctttagaaaaattccatttaaattaaacagcatcgctagtattctaacattgccatgggccggtaatcactacaccgctattctaccatttaagattgcaccatccagtgcaatacatggcggcaagctccaatccaccatccccaagccatgttggctcaagtactggttgcagagagaaaaatgacggcaacccagaaaaccacgatgcgctgacaaaggtgaagggtgcgcagccttgagtacaaggtggcgacgcgtatcaataaccttacccttggcttgggcatagctaccccagagcatgaatacaagtccttcacgctcgcgatttaaggtatcaacgacatggtcggtaaaaccttcccagcccttaccctgatgcgcacctgcacgaccatcctccaccgtcagtaccgcattaagtagcaatacaccacgctttgcccaaggaagcagacagccatgatcagggcgaagcaacccaagatcttcttcgagctctttataaatattcaacaaagaaggcggcaacggcatacctggccgcactgaaaaacacaaaccatgcgcttggccttgaccgtgataaggatcttgaccaaggattacagccttgacccgctggaatggggtcgcttcgaacgccgcaaatatctgagatcccggtgggtagacactcacaccagcaacctttctcgcacgcaggaaggcagacaaatcccgcatttccggacgcaataaccaattaccaacgtgcgccttccaagaagattccaactgaattcgagactcggcactattattaatggcctcaccttgctcgttcatgctattcaaatagtcgctagatcatctttaagacgcgccaagcgcagttggaacaacaccttggttacaagcaaacgctcctcaatcggcttctgcaccaaatcattagctccggctcgcaacaattcggattgattttgagaattggtgtcgccagtcataacaagcactggaaggcggcgtttaccataagaaaaatcgatacggatgcgctgcactacatcacagccactaagctcacctttcaggatcacatcagtcagcaccaaatcgatacggtactcggtgcgccccaacgattcagcagttaacagtgcgaaggcatcttcagcggcaagcacgtgaaccacacgtaaaccttgacgctccagcatacgtgttgtcgcctcagcaaccacacaactatcttctacatacaacacagttccactggatactggctcgggctgcacataaccacgtatgaaggcagccagtgcctcgtgacctaacgctttgtcgaaataatcggtcacatactcagtgaaacgacgctcgaccaagtgctgctgagtatcaccagagacaacgatcactggcacataagcttggcccgcttcctcacgtacgctacgggctaaagccaatccatcaccgtcaggcagaaacagcgaagtagtcaccaaatcgactgttccagcctctagcgtctgccgtgcttcagcaatgccgacacagccaattacatctacttctggtaactcacgccgcaacacgtctgtaatcaatttacgaaccaatttggaaccgtctacgaccatcacccttggcgtattactgatcagatgcctattcttgatttcagaaactagcatgtagctctcatatttacgcggggcgcatttgacgtaaaaaatgtcccgtcaccagccatacaccaagccaacccaaaaggagaatacctccaagaatcatggcaccttcggagatgcccaacccatgaagggcgaaacgactgttataactatccgtcaacaccatcagtggcacacgcaacaccacgccaatcagacctagcaaaccaaacgcagcaagagaagcagccaaacagtaccacgtccccaaatacaggtaaggacgacgaataaaaccatcgctagcaccaagcagatgtagcaccgcgatctcatggcgcctagactggatatccagccgcacggtattgccaaccaccattacagcaccaaagccgagcagagctgaaagtatatgcaccaaatattgacctaagcctagccaagcatccagtcgacgctgccataacacgtcgtactgcaccaaatcagcctctggaagtgcctgtaacacccgcgccacctcgctatctacagcagatagggatggaataaccaccaacaaactcggcaacggatttttaccaagcgcatctatcgcctcacccagcttcgcaccttcgcgtaactcagccaatccctgctctggagtacgaaccaccaccgcagcaacatcgggacgaccacgcagcttctcagccagacgctcagccgccgcaacatccacattggtcttcaaaaacagattaatctgccgggattgctgcacgctgtcagccaacaccctaaggttacctaacacgattgacaaacctaggggcaatgcaagcgccagagtcaatgccatgaccgtcagcaatgtcgccaaaggtttgcgcatcacacaatggaggctaaacgcgatactgtgaatatggtaaccaacccagacagccaatcgtgagtgtgcagccttaatagcagatttattcattctgccaagtcctgcggcgagatatcgtcaacaagacgtccatgatcaaggatcaatacacgcttacgcatcttcttcagcaaagccaagtcatggctgaccaccaacacacttgtaccacgcgccggaagttctacaaacaactgcatgatctcttcagctaacgtcgggtcgagattacccgtaggttcatcagcaaccaataaacgtggctcactaataatcgcacgagcgataccaacacgctgctgctcaccagccgacaactccgatggcaacgctcgtgagcgatgagccaaactaacacgctccaagactgagcacacctgcttgccaatttccgcacgaggaatacctcgcaaaacgagcggcagagcgacattatcaccgacactgtaatccatcagcaaacgatgctcctgataaacagcaccgacttgacgccgatgaaatggtatctggcgcccgcgcacgttaagcagatttagatcatcaaacaatacttcaccgtaggtaggacgctcatcaagctgaatcaacttgagcaacgtactcttaccagccccagaatggccagtgacaaacaacatctcaccctcggcgacactgaaactgacatcgtcaagagcaagatgaccatcggggtactgcttgctaacattatcgaaactaaggacactcatacacggaatcatatcgaagcatcgtaagactacgcagtaatgggcttcctggccctgggcaatctgcttagaacatatttaacagcgagcggatacggtgccctattcgacctaagagcgacggttgactacctgacttaacagccacttgggcggtagtggcgacaacatggccactttcaccagaatccattgaacgactacgacgtcggcgaccgaggtttcgccccacctctttacctggagcagatactatccccgtagacactccaaatacaggagtgactgccccatccacactagaatcacgctcggtctccaagcgaaatttagtgcggcggcgcccacctcccccatccgaccggggccctttacctacacgggggcgaccatcgcgctctccagggctacccctgggcttaccccgacgccattcctgagcaaccagcacgtcaagagaatgtggggaaatatccccaacagtatcaccgttaccattcgatgcacgttcagggcgcgacaatggagccagcaactcagcagtcactgctgcaaccgggatcttctgctcgatatatgcctcaatgtccggcaaactcatcgcgtaacgctcacaggcaaaactaatcgcatcaccatcagctcccaaacgcgcagtgcggccaatacggtgaacgtaatcttctgcatcaaacggtaagtcgtagttgtatacgtaattaacgccatcaatgtgcaatccacgtgcagccacatctgtggcaaccagtatttccaattgccctttctggaaacgattaagcaaagtctctcgcttcctttgtggcacatctccagacagcacaccgacccggtaaccagcctcatccagtgcgcgcgcaacaccttcgacaaacacctttgtattgacaaataccatagtacgcatcccctcgctacgcgagagcaaacccaacagcaatgggattttctcctcctcggcagggaaataaatacgttgacggacccgcgtagtagtgacagtctccgtctccgccaccagcttctctggctcattcatatactcataggccaactccaacacgcggtgactgagagtggctgagaacagcaaagtctgacggctacaacgctcgggcaagcgccgcaatataaagcgaatgtccttgataaaccccaggtcaaacatccgatctgcttcatcaagaacacaaatctcacaaacgcgcaatgaaaccacctcgtgctgcttaaggtaatcaatcaagcgccccggcgtcgcaatgaccacatccgcacctttgcgcaacatttcgcgctgcttatcgtaatcaacgcccccataaatcaacgcaaaacgcaacccaagattgccaccaaatttcactgcatcgttatagatttgaatcgcaagctcacgggttggcgccaaaatcaacgcacgcggatcttctgggttacgattaactagccccggacggctaagtaaacggttaactaccaccaccaaaaacgccaaagttttcccggttcccgtttgggcttggccggcaatatcacgaccagccagtgcaaccggaagagtaagcgcctggatcggagtacagagtgtaaatcctgctcttgtcagcccagtaagcaacgctggatgcagatcaagtgaagaaaaatttaaatttgtcaacggtttatcgctcatcattcagtctttgtcttagatctggagcggctcgggggagtcttgcatggattacaggagcaccgcaaactaaaatctttgcgcaagctagcgccacttcaggttgagccattgatcaatcacacggaccccagcttaccgtaatgtaaccatctgtctaaccggcaattaccttcccatccaaggaaatatcaattgagcgactatgttctacatgtcagcgatgccaatttcgatgccgtggtgctgctatccgatcaacctgtattagtggacttctgggctaaatggtgcagcccatgcaaaattatctctaccttacttgatgatttagcccaaagctacaaagggagattaaaaattgccaaagtcgacatcgacgagaaccgcgcactagcgattaaatatcacgtgtgttctatccccatgctgctactgttcaaagatggtcaagttcaaattacccagatcggcgccgtcggaaagggtcgtctaacccaaatgattgacaaagtgctggcaaacaccgactcatgatgcctcgcacccttcatacctcataatttaccctatatgaatgcagaaaaatcactcgcgtcgcccccgcttgcttggcaacacggacaatgatagggtgaggcatatccggccccaacgcgcgctgccgtatcctgaaattactcccacttcttaaccctgtccgccttttcagggcgctcgcctctctatatagcgaggaaaatacaattgtctgatatcacaagttccgaaagcgggagcgctacctcacatggcgaaagcgaaaaaaccgcgcgtaaaatccgcgcaagcaagtccagtgtggaaagtagccaacaatccgtgacacaccaaaccgtacagccacaaacaccagagaccgaagcccaacgtgctgcgcatttggaatcagctccccctccctcgcaagtcatgtcccaaacgtctgtaaccactccctccgtacaggacagcagtgagtcagcagaaggttatgggcaacagaaccagagattcaataacaacagacgggatcgtttccgcaaccgacgcgagcgtaatcgtgatcgtttccgcgatgaaaacaatagcaacggtgaagacggcaaccacgaaccatacttgccacgtccacacccaagcgtgccagagggattcccaatatattcgctgagcgacctgaaaaagatgccagcacacaaactgctagaaatcgctgagcaactcaacatccacgaaggtgtagcgcgtgcacgcaagcaagatgtgatctttgcacttctaaaagtactgacccgtcacggcgaaggcgtgtttgctgacggcgttctggaaatccttccagatggttttggctttctgcgcgcagccgaagccagctacttggccggtccagacgatacctatatttcccccagtcaaattcgccgcttcaatctacgcactggtgatcacctgtcgggccggattcgtttccctaaggacggtgaacggtactttgcattgtcaatcgttgatacgattaatggcgaacctctggaagcttccaaaaataagatcctttttgagaacctgaccccactgtttccacgcaaacgcttccgtttggaacgcgctgacggctcgacagaggatattaccggccgcatccttgatttgatggcaccacaaggcaaggggcaacgtgcgctaatcgtatctccccccaaagccggtaaaacgatgctaatgcaacaggtagcaacagcgatcactaccaatcatccagaagtacacctgattgtattactgattgacgaacgccctgaagaagtgacagaaatgcagcgcaccgttcggggcgaagttatttcctcaacgtttgacgagccagctgcacgccatgtacaagtcgccgaaatggtcatcgaacgcgcaaagcgcttaatcgaacataaaaaggatgtagtcatcctacttgactcaatcacccgtttggcacgtgcctataacaacgttgtacccagctcaggcaaggtactcactggtggcgtggatgcaaacgcactacatcgccccaaacgcttcttcggtgcagcacgcaatgtcgaagaaggtggctcgctgaccatcatcgcaaccgcactcatcgataccggcagcaaaatggatgaggtgatctatgaagagttcaagggtactggcaactgcgagttacatctaaatcgccgtattgccgagaaacgcgtatatccggcaattgatatcaaccgttccggtactcgccgtgaagatctattgatcgaatccgatctattgcagaaaatttggatccttcgcaaattactgcacccaatggacgagattgcagcaatcgagtttgtgcttgataaaatgaagaacaccaagtcgaacgacgagttctttggttcaatgaagcgctaactaatccccgtccttgcagcctagcccatagacacctacacaaactacagtctactgatatattgggatcattacagatcccaatgggtgtctttccttaaatgtatgagaaggaagctactacagctcgtaaagaactcaatcgaaacgatcacccataatctgtattgcttcttgaaccagtggtagcagcatgacttttacggcacaagaaccatattgttctactgtacgaagtacatcatcctaaatagcaaaagataggcggcactccacaatccaatacgccaattcctactccaccttttccatctttctgtttagagcaaattaataagataccaattacacgcattctcaggcctatgctgcaacaacacagtgagcattactcacaatcacaaaatccaggccgccttatcaaggcctagtagatcaaatctatcccctctcatcgctttgacaaagcgataacactttctggtgttcacgtttaggcccgcatctgaagacgcgggcctttatttttacttccaaaactcaccaagccctatatgactgcttggcaaccataaaagatcaactcgagaacaatctcaacgcatcgttgaaggtcttactaggctgcatcgcagcagcaaccctagccaaatcaggatgataataaccaccaatatccactggaaatccctgaaccacattgagatcagcaacgatggctacctcatgctcactcaggactttagccaaagatgcaaacttaacctgcaacgcaacatcctcatcctgtgcagctaatgcctgagcccaatacaaagcgagataaaaatggctgccacgattatccaactcaccgatttcacgcgcaggagatttgttattatccaaaatttgaccgttagccacgtccagcgctttcgctaacacctttgcagcaacatgatcatagcggttaccaagatgctccaacgatgcagccaacgccagaaactcacccaacgaatcccaacgcaagtaattctcctcagtaaattgctgtacatgcttcggcgcggaaccaccggcaccggtttcaaacaaaccacctcccgccattaacggaacaatggaaagcatcttggcactggtgcccaattccatgattgggaataaatcggtcaaataatcccgcaacacattcccggtcaccgaaatcgtgtcctgacctttacgaatacgggccagcgaaaattccatcgctgccaccggcgacataatacgtatatccaaaccgttggtatcgtgatcttttaaataacgctcaacttttgcaatcacctgcacatcatgcgcacgggcgctgtccaaccagaacactgccggaacatgactcagacgggcacgttccaccgccaacctgacccaatcctggatcggtgcatccttcgtttgacacatgcgccaaagatcacccacctctaccgaatgctcgaacaacacctcaccccaatcatcactgacacggactacacccccactctgtacctgaaacgttttgtcgtgcgaaccatattcctcagccttctgcgccatcaaaccgacattgggcaccgaacccatcgtcactggatcaaaagcaccgtgtaacttgcaatcatcaatgacagttttatacacgccggcataacaacgatccggaatcactgctttagtgtcttggagcgtgcctgcaacgttccacatctgcccagaactacggatcatcgccggcatcgacgcatccacaatcacatcactaggcacatgcaaattagtgatccccttgtccgaattaaccatcgccaaaccaggacatttggcatactgagcctgcacatcagccctgatgactgcctgcatctcctccggcaacgcaacaatgcgtgcgtacaaatcgccaataccattgttaggatcaaaaccgacctgtttcaacgtgtcagcatgcttggtcaaagcctctttgtagaactctgaaacaaacaccccaaatatcaccggatcggacaccttcatcatcgtcgccttcaggtgtaccgaaaacagcaccccctgtgacttcgcatcactcatctgtgcagcaacaaacacagccaatgcctgcttactcagcaccgcagcatccacaatatcaccggcactcactgcaaccttgtccttgagtaccgtcaccgtgccatccttagcaatcagctcgaccttcaacataccagcctgagcgagtacagccgaacgttcactaccgaaaaaatcaccgccctccatatgtgcgacatgcgacttggatgtagtactccacgcccccatccgatgcggatacttacgcacataattcttgactgacaacggggcacggcgatcagaattgccttcacgcagtacgggattgaccgcactccccttcaccctgtcatagcgtatcttgacatccttttgcgcactgttttttggttcatccggataatccggcaacaaatagccctgctcctgcaactctttgatagcagcctttaactgcggcattgaagcactgatattaggcaacttaataatgttggcatccggactagccgtcatttcccccaactcagccagatcgtcactgactctttgcgtctcggtcaacacatcaggaaacttcgccaagatacgcccggccaaagaaatatcacgtgtctcaacctggataccagcaaccttggtgtaagccttgataattggcaatagcgactgcgttgccaagaacggcgcctcgtctgtaagtgtataaataagcttgggcgtattggacatagtgtggtaggaacctctcaatctaaggtggaatcggatgcgagctaccaagcaaaccgccagacccaacgatcactagagagccgatgcataaagaactaccattgtcgcgtgttcaaggaacatgagcaaaacagcgtcccgtgggaaacgcaccaacatctcaatctctctgccaattcaccgcaacgactgctgctaaaacatctccaagccacatttacattctcacacacagccgccacacacacaccagcaagtgaggcaaacaccggatcactactgacacacttactatcacgtatcaacactctcctgatgattcaaaacacattctaataacacccatgacaacaccggatccaaccacacatctcaaaacgccaactcccctcctgcagcactgtcaaacagcggaccgaagcatcccgtatacacatcacaagtcctaatcacccgatttctaacatcactctgaacccatacatttattcagacagaagatttcggtcagtcctttaaaaaaccttcgcatacatccaggttaacttcctcacatcatcgtggatcaatgattcacaacgacagcggcaaaaacacctgcaaaaaaagaattcatcacttcaatggaacagaatcagccttcacatctgaggcccacgagcacccattcacacacccagaacgcaacgttgaacgtcgttcctacgaggcccctcaacagcacgcggcatcttaaaagcaatccactagaaaccggaaatgtattggatcgtggacaccatacagagacacaaaccgacccgtttcgaacctacccgcaacaaccacattgcagcaaactctcagccaccaacatcaacaagacactgaaagccgactgcaccgacaagcagaccaactctattgaagaagactcccaaccgcgcacaaccaccgtattacaggacatcagccatgtttgatcaccgacgaataaacacccaggacaccatcattcatacaaaaccacatgcaacacatcatccgagcatttttaaaaatgccacagacagccccctaacaatacggcacaccatgctatttgcttggctgaccatcaacttgctcacttgtaggagacaccaccggcactcgcttgacagccctacccttaccaaacactgacaacggactctttgttgccgacttaacatcgctgaccacttttacagggatcgcttttttagcctgcaccgctgaacccggttgctttagctccaacaacgctgtcatgatcggcgtatcgcccggcaacggatcactggaagtacaacctggcaccccttcatcagtaccacgcaaatggcctggaagccctgcctcactgcgatcaatcccgctgcctgaaagatcagccgctccaacaccatctggcttgagcagcagatcaggaacaatccccctcgcttggatcgaacgaccactcggagtgtaataacgcgccgtcgtcaatttgaccgaatcgccattatcaagcggcaacaacgtctgcaccgatcccttaccgaaggtacagctgccaatgacccgcgcacgatgattgtcactcagcgcacccaccaacacctccgaagcgctggccgaaccagcatcgaccaataccaccaacgggagaccatccagtaaatcccccggcgttgcatcaaagcgcgtatcactcgccgaaatacggccacgcgtactgacaatgtttcccttatccaacaaagcatcagcaacctgcaccgctgccgtcagcaatccaccaggattactacgcaagtccaataacagaccacgcaacttaccacccgcctgctgcttaagctgccccaaatgcttatggaaatcgttacccgtatcggcctggaaaacactaatacggatatagccataaccaggctcaagcatacggctacgcacactagcgatgtgtatcgtctcacgcttgattgtcatatcgaatggcttgccattcttatcgcgcacaatcgtcaaagtgacttgactccctggcgcaccgcgcagcggcttcatcgcatcgacattggcaagcggcttgccgttgatcgccacgatcagatcacctggacgcaaaccagcacgcgctgctggcgtatcatcaatcggcgcgatcaccttcaacgtgttgtccgactgctcttgcagctccacaccgatcccatcgtaaacaccgttggtttgctcgtcgaaggcatcggcatcctccttatcaaaataggtactatgcggatccaaatccgaaagcagacctcgcaccgccgaatgcatcagcttcctgtcattgaccggatcaacataggcttgcttgatggcgttatacacagaaacaaaacggcggatttcatctaacggcacgttagcatcgttgctctccggcatttccatctcttcaaccggaggagacataacaacaccgctgggattcttcgccgacaacgagaaagacaacaagaccacacttatggccaatgacaacccaacgacacgcatgcagcactccggaaagaaaacggcacccggtactaccgagcaatgacgaattatgcgggaagcaacagacaatacagattgaatggccgccgaatcagcaaataacgatcatagattcgtgacagatacctctacggaatcacacaccgccttcagcgcttttgcaaccaactcaaaggattgatcggctgaccattgtggcgcaactcaaaatataaagcagacaccccctgccctcccgacctaccaaccttggcaaccaattcaccacgtttcacatacgtccctggattacgcaacaacgtgtcattgtttgcatacaaactcatgtaaccgttgccatgatcgacaatcaaaatcattccgtaaccagtcatccattcagcaaataccaccatgccatcggcaactgccaccacattgtttccggccggagcagcgattaatacccccttgctgatcctcccatccggcaatgccccaccgtaggatgctaataagttacccgtcaccggccaactcagcccccctaccttgggtccagtgacgttagtcgtccccttaggcggcatcttagcgggcacatgaccgctcttggcttccaactcagcctgagcagcggaacgccgggccgctgcgcggcgctcagcctcagcgcgcgctgccgccgcacgtaggctggcaagcacttgctccaatgctttggcattctgccccaacactttttcgcgtttactacgctcctgatagcgagtatccaattcagccaccgtcttagcctgcttttgccgatcctgcttgaggatggaagcctgtccgacctgctgaaggcgtgtctgctccaaagtctgacgctgaacagcgatacgctgctccaacgcaaccaagccctgcaactcctgagtcaacgccctaatacgctcggcacgcgcgcgctgcagataccgatggtagatcactaaccgattcgcatccgccacactatcctgagataacaacaacttgagcggcacactgtcacccacctgatacacagcacgcagcaacaccgcaagctgacgacgttgctcctccaatccctgctgcatctgttcacgttgcccttgggcttggatcagcgcctgctcctgctcacgcaacttatcgtcaatccgactaagatcacgtgccgagcgcgcgacctgctcatcaacctgacgcaaacgccgggtcgcatcaccgcgctgactctccaactgctgccgttgcttggccacatcatttaattcgctacgtgtcctagccaacttacgctcggtctcactctgattctgtgcgacggcagactcagccagcaccgcaccgaccaccaatgccaaggcgcattggagacaaaatggaaacagacgcacaaggacggaacgataaggcaacaaacggacaatccaatgactacaacacagatgcgaattgtagccaaacatcctcagattacctgacaagaaaacgacaacacataccgaagatttatgaacgtgcaatcggacgtagacctaaccaatacaacctgatcgataccaaatgacacaactacctccttaaccacatatcaaacccataccgcgcgcaacgacagatcacgagtagaatttctcagtcatccgacgacgagcccctccaatgccccgcacgtttctgttgagcttgaccgtctgcaccggcctggtcagttgccaacgcactccagtgccgccgccgcccaccgctgaagtgacgaccgtgcccactcattcgcacgtattctcagctgaaatcaccgccgcagacgttgctgaactcctaaaatctttcacctcaaaagtctccgaagacagcgccccgaacagcaacggcgaagaaaaaacaatcaactaccttcgcgatcaaatgctgcgtatcggcctgcaaccgggcaatggtgatagctggttccaaaccgtacccatgatcgaaacgatcaccgatccgacgagcacccctgcgttacacaccgcagaccaatcccatcccctgacattcggacgggacatcctgctaggtaccagaactgcacaaccaacagtgaaactgcacaacagcgaattagtgttcgtcggctacggagtggatgccacagaacagcagtggaacgattacgccaaccaaaattggaagggtaaaaccgtcgtcatactcatcaacactcccaactttcacaatggcaacgcaaagctggccagcgccaagggcatgacctactacggatactggacctacaaattcgaagaagctgcacgcaaaggagccgcagcagcactgatcgtgcacgacaacatgagaacaacctaccactgggatgcacttcaaaaatactggtccggaccgcgatatgacctgcccaatgccgacgattcagaatcgcgcctgcaagtacaaggatggatcagtcaacagacagcacaccaactctttgccaatgccggcttggacctcaacaaagcttaccgcgacgcaagcaaacgcggcttcaaaccgatctcactgaaagccaactggtcagtggacctgaaaagcaccatcacacaaaaaacctctcataacgtcattggcgtactaccagggagccagcaggctgatgaagcagtgatttacaccacccattgggatcacctcgacacacagatcgacaacataagcaatgaccacaccaagatagcgggcaatgcgattggcgtagctggaattctggaaatcgccgatacattcactcaccaacgaccacgcccggaacgttctgtcgtgttcttggcgacggcattcaaagcgtcggacatgcccggctccaaatactacgtacagcaccccagcttccccctggataagattgctggagtcatcaacctggatacgatgtcagtcaccaaccgcacacgtgacctgaccgtcatcggcttcggcagctcacaactggaagacattctcaaacccgtcgccgcacttcagggacgcaccctacatggtgaaatatccacgcaaaacgacacatacttccgatcaggccatatcaacttcgccaaagcgggagtacctgcgttgtacatccatcgcggagaatccctgcgtaataacagcaccgtcactggtgggcacaacaccaatcaaaacgatgaacagcaacattatcaaccaaacaacatagacaaccaagcaacttggacgttggatggtactgtcgatgacctacaagcactgtacgaggtgggtcgtgccctgacgatcggcgggcaatggccaaattggtacgaaggacagccgttcaaagcgacacgcgaccgcatgatggcaagtaaaccaacactgatgtcaaacacggcagcacagtgatatgcgcatcaatgaataaaacacctcatcaagcaataggtactgcaacatctgcaaccgcttagaacgactcacaacagcgccattgatggcgatgtactgactccaaacagccaacgtgtcttgactgccctgcaaataccagcaagtcagcaaaccctaaaagacaaaaactcttacgctccacccaaacctgcatctgagacacatcacacaccccagccgagcgcctcggcacaaacaacagcgttgttatcacctatggataactctcacacacctaaaaatatacgatagctctgatttcgtgcgcacctctcagagacagtgataccactcaccgctgaaccttacccacacacaacacaccaaaaacatctctatgcctatttcctttctatgccctttatgcattccctcctgtttcctcatactgctcacagccttaacgacactgacaccagcatcaccaagccatgccacaaacatactgacgtacgctggtatcaaccttcctggcccggaattcagcccaagcaataaaccaggtgttctctataaggactatctttatccaagtgcatctgactacgcttacgtggtcaaaaagggcatgaacatcgtgcgcctccctgtcctttgggaacgcgttcagcccacactgaatgatgcactggacgccacgcaactcaaactgattattaaagccgtcgagcaagcgaaagcccagaaactaaacatcattctagatgtccataactactccgaatataacgatgagctgatcggcactgacaatgtccctatcagcgccttcgccgatctatggaaacgtctgtccctacagtttgccaacgacaaagcagtcatcttcggactgatgaacgagcctcatgaaatcacctcaaccacttgggctcaggctgctcaagcagccatcaacgcaatccgcagcactggcgcatgtaataaccttgtgttagtgccgggtaccgcttacagcggcgcacacagttggctgagcagctactacggcatccctaatggagaagcgctgctgaacatcaatgatcctgccaaacacatggcgttcgaagtacaccaatatctcaatgaaaatagcaccggcacgacgggcgaatgcatcagcaccaccatcggagccgagaagctagaagcattcaccaactggctgcgcacctaccacaaaaccggtttccttggcgagttcgctactggcaacaacgatacttgcaaccaagcattggaaggcatgctcagctatattgaggaaaacgcagacgtctggttgggactgacgtggtggggatctaacccctggtttggtcccgattatccatttaacctgcatccaaacagtgacggcagcgacaagccccagatgagcatcctggaatcacacgcacgtaagatcactaaaatccacaaataatcgtaaaaaacacaccagacgcaataaaaacatgatcgagtgagcaaccaaggatgttgggaaacaaggctttttcacccacagcgccccctctccactgacttgattgacagcaacataattggaaacgcacgtccagataccgcccccaatacgggggtggactcgacactggagcacaactgaaaaagttgagtaccgcagtgcatttgaactgaaacagtgaaggcatgctctctgaatcctcccgatcaacaaccactctcaatacgcacacctcgacatcgccgttttgtcattcctgcttacatctgactcaacagattcaaaatcgacgtcttgcattgacattggactacgacgaaaaaccttttcttcacacttcaaagattattcatcacttactacagactgcgaatatttcttctgcatcccggaattatgaatctttcaccccgtcacgaggcaactcaaagcgcacatttcagctcagtacagctcacctttatccacaataattgtggataaccttgttaataagacagtggcaatactgacaaatagaaggctttaacactgtgttgaaaaaagcggcaaagcaggaaaaaacacttaaaaagtgaacattctttttgaaaaaaatcaaatctttcttattaaaaagcacagtaataggcggccatcggcagtccccatccgcagcaatgcagcataaattgacaacacataaaaataatgcaaagccgcagcttcgacaaaaatcaatcctcaaagagggctatacaagcaacagcctcccggacagtcaccagaaaccccacttaagcgtgggagccacctctgaaatacacatcatctacaacataaagaacagtacagatgccacgatcagcatcccaaagataaactcaaggagaaccaacattcatcctccctccagcgaagcccactagagcttggtgcagtgcgttagcatcccgctcagatcaccgcaacatccatcacctgtgccgtcgcacgcaaccaccgcacaatgctctcagccgcgtcgcgcccttcggccacggcagtgacaactaaatcggcaccacgcacacaatcaccaccagcaaacaacttcggatgcgttgtctgataggtcagtccatcgccagtatcagacaacgccaccacaatgcgaccgttgctcgacgcttgtataccctgcgcagttaaccactccggcaacatcggcgagaaaccgaaagcgataatcaccacatccgcttccagcaccgcttcagtgccctggataggcactgcgttgcgacgaccattggcatccggctcggcaagcttcgtttccaccacagtgacaccaatggcttgtttgtcggtaccggattgaatcgacaatggctgacgattgaacagaaagcgcaccccctcttcccgcgcgttagcaacctcgcgcgccgaaccaggcatattcgcctcatcacgccgatagatacaggtgactttagttgcacctaaacggatcgcactccgtacacaatccatgccggtatcaccgccaccgagtacaaccacagacttccccgtcacatccggcaactgcacctgatcctcccaaccggcaatcggacggccatacggatcattgccagaaacgatacgtccgttctgaaccaaaaacggtaatgccggcaacacgtttttcaagtcctgacccggcaagccaccgtccgtgtagcgatacgcaccgacgccaaggaacactgcatcgtagtgctccagcaacgcttcaatccccagatcctttccaatctccacacccaatcgaaactctacgcccatgccctcaagcactttgcggcgcgtactcatcaccgccttatcaagcttaaaactgggaatcccgaactgcagcaacccaccgatctgctcatagcggtcatacaccaccgcctgaaccccagcacgcgccaaccgatccgcacatgcaaggccggcaggccctgcaccgaccaccgccacacgccaacccgtcggttgcacatggctcaaatcgggacgccacccctgctgcaacgcggtatccacaatgtacttttccaccgcaccgatggtaaccgcaccaaactcctccagcgtgcaactgccttcacagagacggtcctgcggacacacccgaccgcacacttcaggaagcgggttggttgcatggcacaacgctgcggcctcatcaatgcgattttcctgcactaactgcaaccactgcgggatggcgttatgcaccggacacttccaactgcaatatggattaccgcagtccaaacagcgaccggcttggtactgcgcttcggccttatcgaacttaccgtataactcccgccaatccccggaagtacgcagctccaccgggatgcgttgaggcatctgccgaggcaaatcgagaaattggaaagcgtgcttgcgactcataaattaaagattccgtgacttcttcgttccccgcactcaccatccagcgggaacacatactctgggaaagagcgatagcagagagaaaaacgcagtcccttcctgcttctctctagtttatgcaatgggaaacacccccattaagcggcactgcgtagcgactcggctaacgattcgatactcgctgccttcggtttcacaaaccagaacttcccgatgtaatcccggaattcatcaagaatctgttgtgcccaaatgctacccgtcaacgcacgatgtcggacgacaagatgacgcaagtgctggcgataattttcaaagccctcaacagagacacgatggatatcgatcaactcatggttatagcgatccacgaaatcacgttcgatgtccagaatataagccaagccccccgtgaaccccgcaccgaaattcaagccgactttgccaagcacaaggacaacaccatcagtcatatactcgcagcagtgatccccagcaccttcgatcactgccaacgcaccggaattacgcaccgcaaagcgctcaccgacacgcccagccgcaaaaagctcgccaccagtcgcaccgtacaaacaagtattaccgagaattggggtatgacgtgcctcaaaacgtgcgccacgcggtgggcgtaccaccagacagccaccggccatccccttaccaacgtagtcattagcctcaccttccaattccagatgcaagccacccacattgaatgcaccaaaactttggccggcagtcccacggaaacgcaagtgcaacggcgcatcctccatcccgtggttgccatgcacacgggcaatcgcaccagataagcgcgtaccgaccgaacgatccgtattgtgaatcagaaagcggtaatcaccgccggttttattggcaattgcatcggccaacaaactatctatctgtaccgacaaactatccggtgactcatagagacgcttcgcagcacagtgagtgccttcgtagcaggcattcgtcaacagccgcgacagattcacacggaccccctcgcgtgaagacacctccaactgctgcaacaaatcggtacgtccaatgatgtcatccaacgacatcgcacccaggtacgacaaccactgccgcacctcctcagcaagcaggcgaaagaaattctctacgcgctcgggcaagccggtaaagtgattggcacgcaaacgctcgtcttgtgtcgcaacaccagttgcacaattgttgaggtggcaaatgcgcaagtacttacagcccaacacaatcatcggcgcagtgccgaagccaaagctgttggcacccaacaacgccgccttgaccacatccaagccagtcttcaaaccaccatcggtctgcaacatggtgcgctcacgcaaatcattagcaaccagcgcttgatgtacctcggccacccccaactcccacggcacaccagcatagcgaatcgaactgattggcgaggcaccggtaccgccatcgtgaccagagaccgtaatcagatcagctcccgccttgaccaccccagcggcgatcgtgcccacaccaacatgcgagaccaacttgactgacaccagcgcctgcggattgacctgcttgaggtcataaatcaactgcgccagatcctcaatagagtagatatcgtggtgtggcggcgggctgatcagaccaatgccaggtttggcgtagcgcaaccgcgcaatcagatcattcaccttatggccgggcaactgccctccctcgcccggcttggcaccctgagcaatcttgatctgcagcacttccgcattaatcaaatattccggggtgacaccaaagcggccggaagccacttgtttaattttcgaacgcctctcagtcccatagcgcgcaggatcctccccaccttcaccggaattggaacgcccacccaggcgattcatcgcgacggcaagcgcctcatgcgcttccggtgacaacgcaccaagactgatcgcagcagtatcgaagcggcacaagacatcggttgccggagcaacgtgatccaacggagttggaatctccgccttcttcaattgcaacaaatcacgcaatgcagatggtggacgcgtgtgtacagcatccatataacggcgccagtccgccgcatcacccgtgcgtgtcgcatgttgcagcgtcatcaccacatccgggttgtacatgtggtactcgccaccatgcacgtacttcagcaagccaccgacctcaggtgcgatccgatcattccaagcacgtgccgtcaactcacaggcctcagtatgcaactgcatcaagctcacaccgccgattctcgccggagtgtccgggaaacacaaagccaccacatccggatccaaaccaacgatttcaaataactgcgcaccacgataactagcaatcgtacaaattcccatcttggagatgatcttggacaatcccttgtagatccccttgcggtagctgcggccaatctgcgactgctcgcctgccttctgcaacttcaggatgcctcggcgtcccaaattaaacagcgtctgataggagaggtacggatacaccgccgttgcaccaaaacccaacaagcaagccatatgatgcggatcgcgggccgtgcctgtctcaatgatcaggttgacatcgcaacgcaaccccacccggcacaagtgatgatgcaccgcaccggtcgccagtaacgcatgcgccaccggccgctctggaactggatagcgatcagacaggagcaacatgacgatgccatcacgcgccgcttgttcggcctcatcacacattcgcttcagcccagcctgcaacccttcctcaacactgtaagaaaggtcaataagccggttcttttccagatactgcggcatcttcagcaactgacgcaatttacgctggctcagaactggcgaatcaagaatgacgtgattgaccgtttcaggaccagcgtggaagatattggtctcccggcccaactgggtcgtgagggacatcgcaatgctttcacgcagcgggtcaatcggcggattcgtgacctgcgcaaacgcttgtcggaaataatcgtacaacggtcggatctgcacgctaagcaccgccatcggggtatcgtcccccattgagccagtggcttcttgctcggtttccgcaagtggacgcaatacctgctccacttcctccgtgctgagctgaaacagcttttgataactacataatgtctggtcggagaaaggctcctcaaccaacgatggatcaatcaactcggtttgcagataagtcacgccctgctgcaaccactgtttgtaaggcgcgcgtgcacggttaatacggtcgatcgcatcggaatcaagcagatcgccacgcttcaaatcaatcgccatcatctcaccgggtccgagcttgcccttacggatcacccgctcaacgggcaactcccataccccggcctcagaggcaacaagaaagtgacgatccgcagtcaacatccaacgcgccggacgcaaaccattgcgatcaagcatacaagccgcatagcgaccatcgtaagcaacgataccggccggaccatcccaaggctccgtattcaagccgtaaaactcatagaacgacgccagatcagcatctttgaattccaacgttctagttgctggcggcaccagaatacgcaacgcctgtaacaggtccatgccaccagcgatcaacagctcaagcatgttatccagactctgcgaatcagagcctttcatcgaaatcaccggatcgaactcggccatatcgaaacgcggactttgccataccttactgcgcgcctgcgcccaacggcgattgccttcaatcgtattaatttcaccattatgggcaagcaaccggaatggatgcgccaacggccaacgcggcaaggtgttggtggaaaagcgttgatgaaacacgatcacgctagaagacagctcgctgcgctgcagatccggataaaacaccggcaacttatccggcaacaccatccctttataagaaatcgcatagggggacagggtggcgacataaaaatcatgataatcacacaactgccgctcagcacggcgacgcgccaggaacaacgccaccccgaacgcatcctcactgtgtttaggatcaatatcaacgaacacctgctcaatgtgcggcaacgtatcccgtgccaattgcccgcacacactgcgattgatcggcacctcacgccaaccacacagccgcactccaacgcgttgtaactcagcctccaacacctggcgacaatgcgccgccgcggcacgttcaccaggcaggaacaccataccgacagcgtaacgggggccaagcatgataccggcctcaccagccaacgcacgcaagaaagcatcaggcttacgaatcaacaagccgcaaccatcaccggtcagcccatcggcagcaacacccccacgatgcgtcatgcgcgaaagcgcagcgatggcaatttcaagcaacgcgcgggaaggctgatcatccaactgcgcaaccatgccaaagccacaggcatcccgctcatcgctggcatcgtacaacatactctcttcaatcctttggcgggtgctggaaaccatggctgccttttacgatacgggaaaagcggcaacgcattactcacggctcttgccgtggaacgcgctgaataaaccgcatatccctcgactaaatcacagttgctccagtaccgcaactcaccgttacacctgcaacacactacggatgcgcggatcaagcaacaccatgactgaccatgtccatctcttcgaatacacagagattcatcacgcaatgcacgctctgatgcccacgactcatacccacattgcaactccaacacaccctgcatcgtggcaacagtgaccaactgctccacgaccacacccacctagaccgaccacttcgacaatcgacacacaccctcttcatttacaccccccattgcatctccgatcaacacgcatggttgacgccccgtgcaacatcgacggtggacaagggctaccgctaccatgattgcatccttctccagcattgctatgccacacgtctccctacttcccagcccatcaccgatcgcattcatcggcggcggcaatatggcacgcagcatgatcgcaggcatgattcgccaaggcgcccccagcacgtcaatatgcgtcatcgaaccaatcgccgcactgcgcgacgcacttatcgccgacttcaacatcaaggccgtcaccacagccacagaagcggccaccgacaccagcacctgggtgctggccgtgaaaccccaagtgatgcctgacgtgtgtgccaccctgccacttccagtgcaacccaacacaccactggttatctcaatcgctgcaggcatcaccacctgcaaactcaaacactggcttggcgacacctgtgcgattgtgcgcgccatgccgaataccccagccctgctaggtgccggcgtgaccggactattcgccacctcacacaccacggccacacaacgcaccctcgctgaagaactctttaacagcgtaggcaagaccctatggatcaccgaagaagcgttaatggacgccgtgactgccgtatcagggagcggtccagcctatgcgtttttgcttgccgaagcgatggaagcagcagccatcatgcaaggcctctccaccgcaaacgcacgcacactcgtccagcaaaccctattgggtgccgcacgcatgatgaccgagttaggggaaacacctgccgcactgcgccaccgcgtcacctcaccgcacgggaccaccgaagccgcaatcgcaacatttcaagaaaacgacttccaagcacttgtcgcaaaagcgatagatgccgccacacggcgcgcgcgcgcgctcggaaaggcaaacgataccgagcccacctgagaacgcatcaatccccggatagcgaacacaatcgcaacaccgccgattcagacacaacaacgcaccaacaccccaacctcgtagcgatcattcacggcagagcccatccccagccccaagcccatcaccccaacacgataaacatcccgttgcttcgcaagccctacgtggatcaacacctcatgcctcttccttaccgcaaacacatattgagaaaaacggaaaaaaattcttcaacactccacgatgcccatgcccaaaacatggcttaacccactgcggcagtacatcacatgcaatgcaaattagacatgctgctgaacccttaagaaccaggacaataaaccgattcagccaagcaacacatccagtcaaaccacaaccgcacggacgcatcaagaaacacccgcaagaaaagtaataaaacaataaagattctgtaaaattgttattgacaacacaaccaacaatatcaagactcaatttgaacctggcggccccgttaattgaaaaacggtaaatacccggtttttaggaaaacgggtgattgagaccggccactaccgaaccaatccgtcataaataagtcaagaaatcaaccaacagcaaccacacccgcagtgcaatacccccgcaacaacacggttccaggcacaagctcctacgttgggcaacgcccaccgtacccaagcactacatttacgcaatgagtattaagcaatgtataaccacaccataaagctagcattctgtatctcatccgtactttatttctccacttcagcaacggcagcccccaacactgacactgtcaccaaactggataccgtcaccgtcactggataccgcgcctcactggaaaaaacacagtccatcaagcgcgccgccaattcgatcgtggatgcgatcagtgccgaagacatcggcaaattccccgacagcaacgccgccgaatcactctcccatctccctggaatcagcgtggaccgccaattcggcgaaggcgaaaaaatcagtatcaacggcaccgacccggccctgaaccgcgtcttactcaacggccaaaccattgcctccggcgactggggcggcaacccaaccgacaccagtgggcgcaccttcaattacagcctgctgtctccggaaatcatcggactgatggaagtgtataaaacaccggaagcacgcatcgacgaaggatcaatcggcggcaccgtgatcgtacatacacgtcaaccgttggacctgccgaaaaacaccatacgcggctcgatcggctacagctacaacgaccgctcccaaaaaagcaacccacgcggctcgatcctatggagttggaaaaacgacagtgagaactttggcgcattgatctcggccacccacgacaaacaggacattgcacgcgccggcatcgaattcttcggctataccaccggtgcgaatatcccccctgaggccaccatcacaggcgacggcagcacgctaaccactgcaaaagtaccggctggcattaacagcgcattcttccaacaaacccgtgaacgtaacggactccaaggcgcactccagtggaaaccgaacgaacaaaacgaattcaacctcaccggcatctacatcaaaggcaaatacaataatttcagcgaatcacgctatatctgcccctcttgcaacaacgacttaaacaaagtctccgcggccaacgtacaaaacggctacatcaccacagcgactgtttccgatggaacagcaggacagccttacgcagagcttgatgcgaattaccgtgtgagcacagtcaccacaaacagcttgaatctgcgccatcaatggtccggagacaaatgggtactcaccacccagaccgggacgacaaaagccactggcggaaaagatcccgaatacttaatgaaatttctgctccaagaaggcggctatcgcttcaattacgacggcacccataccggcgtaacttacgataacaacaacgcatccaactgggccctaaagagcggcgaacaagcgggcggccttgaatacacccggaccaacgaccaagaaaattacttccagttcgacgccacacgcgacctcaattggggtcccttcaacaaattgcaattcggctacaaatacatcggccataagaacggccaaacctcccgtggtaacgcactgtttgctaaccaagacgtcctattaacaacattcaatcctggcatgacacccagaggactgtacaacggactgggagccagcggcgacctcatcaactggccaaccgccgaccttcgctcggtcctgtcctatctcaatgcattgcctgaagcggccttcgaaaccaaatacaaccaacaattcagcgtgacagaaaccaccaataacctatacacacagttggatttcgattctggaaaatggcgcggtaacgtcggcatccgttacgtggacaccaaagacaacatcttgtattggcaaagcaccaccgtaaacgacaccgtcaactatcaaccggtaaaagactccaaacgctatgacaagccactaccgagcctcaacattgcctatgacctgaccgacaacagcgtcctgcgcttctccgccgctcgcgtcatcgcacggccacgttacggtgaccttgccggctccttttcactgaacagcacctctggcgacctgactgcaagcggcggcaaccccaacctgaaaccctaccaatccagcaactacgacctagccgctgaatggtactttgccccctcaagcatgctgtcagcggaagtgttttaccgtgacatcagctcctacatcgtcaccacgaccacaactgaaaccctgagcgacccatcaaacaatatctacaacaaaccctacaccgtcacccgtccgatgaatgccaccggcgccaaagtgaccggtctttcactgaactaccaacacgcattcgcctacggctttggtctggccacaaactacacctatgcacaatccagctctaacgatggcctgaacctaccctacctctccaaaaacacctacaacgtgatcccctattgggaacaaggcccctgggcagtccgcctcaactacagctaccgatcaaaatacttcacccaaatcggacgactggattcgcaggtcttcacagatgcttacaaagaactcgacctgaccacatcctacaaatttaacgactgggtcaccctcaacatcagcgccaccaacctgctgaattcaacctactactggtacaacgaagttaaatacgcccccatcggcatgtacaaaaatggccgtggctaccaagcacaactgaacttcaaattctaagtaccctcaccgcgcgccactgcaaaagtggcgcgctttccggatatagaccgctccaatcagcgcatcacaggagcacccctcccatgacactcgccccccgtcttcgcaaaaacatatcccgcaaagacaccaaaaccgcacccctgacacacagactgaccctgctgctcaccctactaccactcccctcattcgcagccgcaccaccgccggcaaacactgactctcccgaacaaatcgatcaacagtggctacaagccacggcccggtacgcaccggaacgcgaccacctcgtacacattgcacaccatggtgcaacacacggaccattccgccccgactggccatcactgaaacagtaccgctcccccgattggtacaacaatgccaaatttggcatcttcatccactggggcgtcttctccgttcccgcctttggcagtgaatggtactcacgcaacatgtatcaacagggatcgaaagaatatcaacaccacctagccacctatggcccacaaaacacattcggctacaaagacttcatcccccagttcaccgcatccacattcgacccaaacgcctgggccacactcttcaaacaagcaggtgcccgctatgtcgtcccagtggccgaacaccatgatggatttgccttgtacgactcccatctctcggactggaccgcagtcaagaccggccccaaacgcgacctactcggcgaactctccacagcgattcgagcccaaggcctacacttcggcttatcctcccaccgcgccgaacacaattggttttttgacggaggccgtcaatttgattccgatatcaatgatccacactacgccgacttatacggcccagcgcagagacgcttagcaggaaaaactgacgaagacgtcgccaacgactggacacccgtttcccaagcctggctcaacgactggttagcacgcacgacagaactcatcgaccgctacgcccctgaactgatctattttgactggtggatcgcacacccagccttccgcaacacactacccaccctgctggcttactactacaaccacggccaaacaaaaaacacctgtcatgccccccctcaccacacaccgtccaccgccccatcaccgcctgcccccatcaccgcaacacacctgcccaccaccaccacacaaccgcaatgtggcgtcgtagtgaactacaaactcggcgccctccccgatggagccggcaccttagacatcgaacgcggccaactcaccggcatccccccacccactggcaaaccgacacctcaatcagcaacgcctcctggggatacattgaaaacgacacctataaatcacccaccttcatcatccacatgctggccgacgtcgtcgccaaaaacggcaacttactcctcaacatcggcccacgcgccgatggcagcatcccagacgccgagcgcaccatcctgctcaacatcggcaaatggctgaacatcaacggcacagccatctacgatacgcacccctggcgcacctatggcgaaggtccaacggaagtcgctggcggcacctttcaagacaccaaaacaaaaccctataccgccgaagacttccgcttcaccgtgcacggcgacaccctatacgccatcgaattaggctggccgacaaatggccaaaccgtgatccactccatcaacgcatccgacaacgtctacagcgtgacactgctcgcagacaatcgcccaatcccatttgagcaacacaacgacggcctccacctgcatctgccgaacaaacctgtgggcgaacatgcctacgtcttccgtatcaccacacacacgcattaacccatcttcgccccacgcacaccttggcattgcgatctacccattcaaattcatcattccttaaaacacaccacacctgtagatcacccctcggaaaatgaaaacaccgctcccaatgacgccccctcttcaaccgctccccccatcatgaccacaccgaatcaagcccatcaccccgcaacaaccccacagcactcatcagtgacaacccctacctgaatcccatacaatccacactcgcttccggccaacatctgtccaacaagacatccggtagctacttacgcttttacctcaccgggggtgcactggcttcgacgggggtcacaaaatcacttggtgcatgccgagggggccgctttcctcgtaaatccagcagcaaacttatagttgccaacgaagacaacttcgctgtagccgcttaaggcttaagcctcgaaactgcttgtgtccgtgctcgcagcgtagagtcatcatcacggaaccgctgagacgtggccgtctgcccatcctcggttaaatctagcagactggtttccgggtgcgctttgcctgtcgtgctgcccggcgacgagacctaacggcgaggataagcatgtagggccggggatggagtactttcggacggcggttcgattccgcccacctccaccataatgtgaaatcccaaccctgatccggttgggattttttttgcctgctccccttgtgttggcgcgacttcctagcttggcctcacgagcgccccctccccagactctgcgttttcacccctgttgacacctctactgttctccattttctctgttggtcacacgagcattctcgtggtcacctcctttgttggcggggatttagatgcgactgattgtgctttgcaactcctgtaacggtggcgactgcccctccgaccgcgaggaggaaaatgttctcgacgcttacgaagtgtcatccatagcaacgcgttttccctcaatacaggtgcttgactgggtttcaatagccaccataattgagcgcgtactcaatcaaattattatgatgtcccatggcccgcccgcaaagtaaagacaaacgccagatgattctgcaaaccgcaatccagctgtttgccgaagaaggcttgaacgcgccgacggctcggatcgccaagttgacgccagtggcagaaggaacaatctttacctacttctccaccaaggatgagctactgaataagctctatctggaactgaagagccaacttcgtgacgccctcgtgccgccactggaatccgcagatctgcaggaacaggtctggatggcttggcagacctacgtgaactggggggtctcgcatcctcaagagcacctggtcttggcgaagttgggcttgtcgacgcgaatcaacgaggcaacccgcacagagggcaatcgaactttctgcggagtgtcgggtttgctgactcaggccatggccacgggcgctttgtgcaatcagtcgccggatttcgtcggggccctgatgggggccatgggtgatgtaacgataaccttcatcagagcgaatcccaccggtgctgaagtgacctgccgggatggtttcgtcgcgttctggaacgcgatcacagcaaaatgattttcgccatttattgaatgcgtaggcgcttaacattttatcaacgtgtaagaagttagcgacgacttcccacttttaaggaaagttttcatgcaagatctgaaaaaaaaagtcattctggtgaccggtgcctccgacggcatcggcaagttcacagccgccacccttgccaagcaaggacataagctcatcattcacggtcggaatcgacagaagaccgaagcggccctcgcagagatcaagcggcaatctggtaaccccgatgtcgcaatgtttcttgcggacttcctgccgctcgccggcgtgaaggcgttcgctgacgccatcaaggaaaaatacgaccacattgatgtgctgatcaacaacgctggcgcgcagttcaccgaacaacgcgaggtcacgagcgaaggccatgaaaaaacaatggcgatcaacgtctttgccccaatgttactgacaaaattgctgatgcctctgctggtcaagagcgaatcggcccgcgtcgtcaccgtagcatcggatgcccatcgcatggcaggcaagcccgatctggacgacatcgaattgaaacagggctatcacatggccaaagcttacagcctatcgaaactatatgtgatctgggtgatgcaccatttcattggcgagacaaaaaaggctggcatccataacgtgacgttcaacctcgtgcatccggcgtcgacgcgaacaaacctgggcagagaagccgtgaaatcctggaaatggaaaatcatctttttcctgtggcagatcatgctggtgtcaatggacaaggcggccagcagcaccctgtatgccgcaaccgccccggaattagaaggcgtgtcaggcaggtattttgggccgaagggagaggagcagcccagcgccaaataccattcccctgagaatgaacagaaggtctgggactacgcgctgaacgccattcgaccctatctcccggcaggggcacagtcatgacgcatgtcctcggtcgattcttgtccgccctgtttctgtacggctctgccggtacggtcgcacatgcataagacggacaaacctttgcgatccagaacatcgcatcaggcaagaacctgcggcccttcgaggccagacgccaggacggtaactggatcgtcctctatgaccatcactcttggaaatgcttgacttgggcattcaaacagctccgcccagatggctagatgatgtgtggcgcaagccatgtcaaacgcatcagttcgttagtcaccgatggatgcaatccttccgcccaagcaatatccgacccactctgcatcacgccggtgtcgaccaagtgctgccagaaaaaaccgcgcgtcgtccctccagcaagatcacatcgtggacatatcggtcatcggtaaccacacgccgcacaccacatcgccggaaagccagcggcacgaaggtttccaacgagtcgtccatcatacttccacctccagcaattccacgccgatgctgttgagagcgaacttttcgatcaacgcattccagccgatctcgcgccacttcaccttgatgccctgcacctctccggcgtggagtgatgccgaccacgcgccgctgtccagtgaacatgggctgaccttggccacaatagtttttgcacgcctcatttcatgattgactcattgccagtaagacaaatgagtgctcagattgtcgacgaccgaaaacagatcgtcctttggatttgactgtcaccagaaaccctgcccacaaatccactattccagcgcaaatgaatcgaatcgcaatccgctgaccgcattccaatatttcatcaaaccgctggttgacttgatcaaagcgtcgatgcccttattccttgcttcacgcatcgcattgaagttgttcggattcgtgctcatccaaccacccgagccattgggaatctggagctctccgaaccctatttttatcactggcaccacatcgaatgtgatgtcattcagctcaagcacgctccttggactggattgatcaatctccgacgatccatagcacctctcaacaaacgcctttaatcgactcaggtacgtctgcggagtaacactgccatcgctaaagacaaccatctcatcaacatcggaccgctcatccatcgaacgacgcaaaatcgtgcctcaccctgatgacccgaattggaaattctgagcgatcacgccgctgtcaaaatgcagcgccatccgggattaaagcgttgtgattgacgtcatgatcgacgaccgaaaagccaaaaactgtccggcagcattgcagcacactcgttgggcctgagaacgctcagcaaccccgtccgtagcgacgccagcaaggtgaagacactgacccactcacgttggcttttgaccaaaaccgcacctgcaatcacaccaagagcggtcgctggcacaccgagccaatccttgcgccgcacccatgtagcttcggcattgaaatgccccttactcgaatacagagcctcttcctccagtcaccccgccgctctgcaaagcgcagaaatgttgacttgatcctctggagacattccgctcatcgcatcctcccacaccaatgcctactcatgccgacgcccccgcctgtggcggtgccttcggcggccccctcccagtctgataagtcgcatcaaacaccgtatccgtcagccagcgcttgaagctggggttatcactgaactgcttaaacagctcagtgtggtcagacaacaactcctgcaccacacggttgagcgccttatcgtgctccaacttggcgttttgcttatcggaattcgcctgcgcattctggtaagccttgtcctgcgccacccgcgccggaatttcctcggcgatgaccttgcggatcttatcctcgtccttccactggatgttgccaaacagctcgttgaacgttttgataatcaccgagagtctatcgatgactgcctcccccttgccgccaccgcctcccggaggcactggctcgacagaagcatctgcgtcgtccatcgccatcttcagcgccgccttggcctccacccggtagctgtccatgtcgatagtctccagcactcccttggaaaggtcctcctccttgggcgcaggcaacttggggatgagaaagttcagaaaaatcgacagcttttcccacgcaggatgaccgtagctcaaaatcgcagcaaagaagccgtagctgcgcacgaacgccttggccttgcccttgaacttgacctgatcatcctcgccgagcttatcggtgtattcggccacgcacgcatccaggatagggtcaagcttgtcccgatccgcgccactcacgtacagcgccaccacatcttccacctgcggccagctatacacctgcggcccgtcaagttcggccttcaggtcatgcagcttattggggtcggtttcgcccatctggatggtgacgcggtagtagtcctgaaacgccgccttcaccgcctcggcattgtcggcgaagtcgagcacgaacgtatcgtgcttttgcgggtgcgcgcggttcagacgtgacagagtttgcaccgccaacacacccgccaacggcttatccacatacatcgtatgcaacaaaggctcatcgaagccggtgacaaacttgttggcaacaatcagaaagcgatacgggtctttcttgagagtgtccggaatgtccttgctcggaaacccattgagatcagcctccgtcttcttctgcccgccaatctcgaagctgcccgagtacgccacgatggccctgtacgggcttttgatctgcgtgaggtagtccgacacctcacgccagtaatcaatggcccgcgcgatgccgttgcacacaatcatcgcccgcgcctggccaccgatcttctgcttaccaacaacctctgcgatgaagtgatccaccataatctcggccttgcggcggatcgccttgtcgtgcgattcgacgtagtggcggatcttcttcagcgccttcaccttgtcgaattccggatcctccgccaccgtcttggcgacttgatagaaactgtcgtagggggtgtacttctccaccacgtcgaggatgaacttctcctggatcgcctgcttcgtggtataggtcagctcttcaggcgagcggaactgcaccttgtcgccaacacgcgtcttctcaccgaacaactccagcgtcttgttcttgggcgtggccgtgaacgcaaagtagctagcgttggcgagcagcttgcgcgaggcgatgcgcctctcaatttccgcgttgaccgcatcctgcgtcctgtcctcctcgaactcctcctcggccaccttgccaccgagggcttcgtgcatccgcgccgtggtcttgccgccctggctggaatgcgcctcgtcgatcaacagcgcgaacctcttgccagagagatcgcccagctcatcgaggatgaacgggaacttctgcaccgtggtgacaatgattttcttgtcccgacgcagatactcgcgcagctcctgcgcgttgtcggagtggccgaaaatcgccgccacgtggtcgtaccccttgatggtgtcggcgatctgcgtgtccagcgcgcgccggtcggtgatgacgatgatggaatcgaactgcggcgtcatcgggtcatccttgcggcgcagctccaccaactggtgcgccagccaggcaatggtgttgctcttgccgctgcccgccgaatgctggatcaggtaacgcctgcccaccccgtcactgtgcgcacggcgcagcaaggcacgcaccgtgcgcaactgatggaaacgcgggaagatctgcttgcgcgtcttgcgtttcttaccgccggggagcacttcctcccccaccaccacctgcgcgtagctctcaatgaggttggccagcgattcgcgggtcagcacctgtttccacaggtagtcggtcttcagaccattcgggttgggcggattgcccgcaccgctgttgcagccctgattgaacggcagaaaccacgacgccttgcccttcagctcggtgcagaacgcgacccccgcatcatcgaccgcgacgtgcgccacgcaacggcccaactggaacagcaactccttcgggctgcgcgtggtctggtactggacgatggcgtcggccagagtctgcttggtcagcgcgttcttcaactcaaaggtcaacaccggcaggccgttgatgaagatcaccaagtccagttcattgccggaatcattgctgtagcgcacctgccgagtgacactgaacatgttcttgccgaaggcatccgccgccgcagcattgcccggcgtgggcagcaacttgtacagatccacgtgtaccggcccgtggcttacgcccttgcgcagcacgtccaccacaccgcgcttggtgatctccccttgcaggcggtgcaagaactgcgtgcgtttgatgccgtccgccgccaactccaatgtctccaccgccttcggctgggtggcctgcaagaaagccagcaactgcgccacatccagcgccacgtcgcggttgtagtcagtgggcttgccctgcacatagccgttgtgggtggcggcaaagtccgtgggcgccagcgcatggctgtactcgggctgcggcacgccagtcaggccacgcaccacgcgcgcctcgaaccagcgctcgctggtgtcagtcctcgtcatcgtcattctcctgttcggtcatctcttcctggtcatcacccagcgcggccaacacggcgtcgtccaccacatcctccgggccgggctgccagccgcgcacgtccacttggccggtgaccacatcagtaatcaggcggtcgcggtattcgcggatgagggtgatttcttcctcggtgcgggtgatggcgtcgtctagcggcgcgctttctgtcttgatgtgcgcaacgatggcctgctgctcatccacggtcggtggcaacgccactgggaagcgcccaaggacagtttccgcgatggcgggatacgcgatgccgatggagttcgccgccaccctatttacgaaggcactgctctggatgacgtagccgaggtattcgggctccgcactgttgccgggcgtaagcaccgcgaagccggtggatgcgatcaggtcatccgcctcctcactgacataccagatagccttgaggtacgttcgcacagtcgagatgatggtatcgcctcggcgtagaacgcgacgcgctcgggacggcgcgacctcgaaacggatgcgctcaagttccttcgccaagcgcccggtttgcaccgagccgatgtccacgtagcggaactcaaaatccggatcggtcttttcgcccagcgtgctggcattgagccgcacccaacgtttgagcggcttcacatcccaatgcaccggcacatcccccagccattcgatgccggagggctttagcgccaccgatgcatcaagcccgcgcgtcaccgcgtggtcgatgatgcgccgcttctgctcagtgagcagcttgatgagatcgcgcttgaccttgatgaagcgggcgatgtgcgcgtcctgcacccgcaggtaggcgacgatctggtcttgctcggggcgtgggggctggatcagcgcaatgtcgaggaactggttcgggtacaggcgcaaacgagaggatcggatgccggtcgagcgcccgatgtattcggccacgtaggcgcgggtgcgcaacaggtaatcgagatacgctgggttgaagctgtcggcgtggtgcgggcggtacacgccataggcaggactgacgatgcccacgtgcctgctcgcaccaagcgccgccatccacgcccacagcgtgttgatgacgatgtcgccggggcggcacagcttggagccaacgtagctcgctgccttgaacatcgtgacattcttctggctgcgcgaagtaacgccggtgaggtgagacaccgacagcagttcttcctgtccggtcttcgaacgctcatccacctcgcggaagaaggttttggcgcgttgctcgttccagtgttccggcacagcgggcagccagcgcatcttcggctgccggtagttcgggtacacgctcaccaccgccatcacacgttccccacaatcttatgcagcaacccttccgtctgctgctccagcgccaggatgtccgcgcggatgtccgccagcgtccgcaacggcacgggcttgtagaaatagcgagcaaacgaaatctcgtaaccaacctgagtcttgtccgtagcgatccaggcgtccggcgcgtgcggcagcacttcgcggacaaaaaaggcatcaatgccgcccggttcctgcaacggcacctgctcggtatcgcgcagcgcgctgtctggttcgtactcgaccatgaagcgatccttgcccacggtttccagatacgcgccatcgaagccaggctcgaagtagtcgcccgccttgagcttactgcgcttggcgatgaccggcagcgcggcggcgtcgcgccagctcaccgccttgtagatggcctttttctccgacgcgcttaagcgttcgtcctgcgccttgcacacggcatcgaagccggagcagaacgcattgtggtcgtcgaacacggcgcggcccaatgcctgctgcgcccgtcgcgccacctccatcagcgctttgtcgcgctgccacgtcgatgcatcaagcagcgtcttgcggcgcttggtgggcacagccttgcgcgcggctagagcctcgttgtcgtcgccactgtcgctgtcgtcgtcctcgttctcatcctcgcctttcagccatgcttcaatggccggtttgcgcttggcgaactcggtatacagcgcctcgccgtgggtggcgtagatctcggcgcgcagtgcctcctcgccagtggcaaaacgcagtgactcgatacgttcgtctgagagctggcttttcaggcgtaacgggcgctcaatggtgaccttccaatagccaaagtcttgcgtgtcgaaccatttggactgcgcagcttcctgcgtctggccgaggtagagatcgaggatgcgggcaatatccgcagcacccagttcgcagttcttcttaccgagattgcggcgcagcggctggaaccactgcgaagcgtcgatcaactgcaccttgccacggcgggcctcggccttcttattggccagcacccagatgtaggtagcgatcccggtgttatagaagatgttgagcggcagggcgatgatggcttcgagccagtcgttctccagcacccagcggcggatgttgctctcgccctggcccgcgtcgccggtgaacagtgccgagccgttatgcaccagcgcgatgcggctgcccagcggcgtgttgtgcttcatcttctgcagcttgttcacctagaacaggagctgcccatcgctggaacgggtgaggagcttgaactcggcattgcccgcgtgactgacgataaagcgcgggtcactgaactccttcttgccacccatgcgctccagatcggtcttccaactcttgccgtagggcgggttggagatcatgaaatcgaatgcgcgcgaagggaactggtcggccgacaaggtggatttatccgcgccgccgacgatgttctcagcttccgcaccttcacccttcaacagcagatcggccttgcagatggcgtaggtttcgtcgctgatctcctggccaaacaggtgaatggagacctccttgccgtgctgctgggccagcgcgtgcagggcttcctcggccacggtcagcatgccgccggtgccgcaactaccgtcgtaaagcgaataggtgctggactcaatgcgctcggccaccggcagaaacaacagcttggccatgagctgcaccacgtcgcgcggggtgaagtgctcgcccgcctcttcgttgttgtcttcgttgaaacggcggatcagctcctcgaacaccgtgcccatgccatggttgtccagcgcgggcaacttgatgcggccgtcggcatccttcaccggcagcggcgcaagattgacctcagggtcgaggaagtcttcgatcaggtagccgagaacatgggaatccaccagcttctggatctggttgcggaagttgaacttggtgaggatctcctgcacgtcgagcgagaaaccgtccagatacgcaatgaagtcatcacgcaggcgctgccctgccgcgctggccttgagcttggccaacgtgaattccgagacgttgtagaacgcctgacccgccgccatacgcagcgcgccgtcctgctcggccacctggtggacgtcgaggaactttttgcgttccagcaccgcgtccttggtgccttccagcacagcgtcgagccgtcgcaacacggtgaaaggcagaatcacgtcgcggtacttgccgcgcacatagacatcgcgcaggcggttgtcagcgatgttccagatgaaatcggaaatccacttgatctggctttggtcttgttgggtcttctgcatcgatacgtttctcagctcgccaccgtgcctgtggcgacggcgagcttccaagggtctttaaggacgcccacaaggcgttgctggcactgtgccagaaacgtgggcgtccacgcgttttctgatctgacttcctgcggcagcacgcagggcgacgccttgcccttgcccctaaagtaggcatccttcttcttggcacagccgtcgttgctggcagacgcgttctggttcctctccagcggaaccagattggccaaacggtgcgtccagccatcgcgctcgtcttcgtccgggaaccacttgatcccgtccgaaccgtcgggcggtgtttgcggcaggccgtgctccagcaacacggcatcttgaaattgcactccgggggcacacaccaaggactcaaagcgcaaaatcagcgtcatccgcgccttgggccgatcctcgtaaccgcctccatcaagtgccgcgacgcactggcgctgttgcgcgtctgtcagggccagcgtggtgagcgcggccagatcccccttcaaggactccagctccatagccaggctggtgcgacgaagaaacgcaacggctgcgttgatcagttcggtattcactgttgtaggccgtggaggcaaggccggggcggtgacagcacttggatcaccgtcgagcgcaccaatcaacacgcccctgtgttcaccaaacggcagacggacgtagttctgcattacccactgttcaaaccagcccaaaatatcgctcaaagaaagtcgcaagcttgtccagcaccgtctgcttcttggctgcatggccgttgtttttggaaaatcgcgatactggcggcaagattttggtgattgccgtgcccgtggcagggatgctgccatcgcggaacgcatttgcaatgaactcgcgtgtcgcctcggcgttgagattttcctccgcgatgatgccctccaactcctggctctgcttcaccgccacaaaagcctgccactgcgcatccaccgtggccttcatgctcaccgcatcgacaaactgctcaatcaactctttcttattacgcaaactggggctggaatgaatggcgcgctcgatcgtcgcgcggatgtccttatcctcccctgtcccctttttcttcacatactgctcgaccaacaacaaaatgaaatcaacattgatttccacctgcttgatgagttcaatctcgaaaaccacatcatcattaatcgattccttctcggcagccgatgcactgcgaaattccgcatacagattcaaatacaaactctgataatcctgaaactcccgctccgtgagcacttcctgaccggcgaaatcatcaaaagcagtcagaatatttttcagcctcaatatcgaaccgaataacgtgataaatgccttttgtgccgcctccccgacgatcaccttccccagcggaaatgcggccaccagttcccccacccgctcctcatactccttgtaatactcagcgtaaggccgcaacagcacgatgcccttcgcatccttgttgccaaacaaagccagcgcctcattcgtctcctgctccagattgcggaaagaaacgatgttgccgtagctcttaaccgaattgagaatgcggttggtgcgcgaataagcctgtatcaaaccgtgcgccttcagacgcttatccacccacagcgtgttgagcgtggtcgcgtcaaagccggtcaggaacatattgaccacgatgagaatgtccaacttacgttttttcaggcgttccgacacatccttgtagtagttctggaacttgtctgccgaggtatcgaaactggtaccaaacaacgcgttgtaatcctggatcgcagcttccagaaaattccgcgcatcttgatccaaacgctccgtttcaaactcctcctcagcgagcagctcgtcaccgtccccctcattggcagcaacactgtagatcaaccccaccttcaaccgttgtgcctcgggcaggtccttttgctgcgccatcaattccgcgtaataacgtttagccgcatcaatcgaagcagtggccaacaacgcattaaatccctgcagtcgctgaccctcgtgacggtagatgctggcacgcttggttttctggtcgaagtgctcgcggatatagctcacgatctgcctgatccgctctggcgccaacaacgcccgctcggtgtcgatggccgccacctgcttatcgttgatatttggctgtgatttgatcgtattgatgtaatcaatgcgaaatggcaacaccgtcttatcattgatcgcatcaacaatcgtatacgtatgcaacgtatcgccaaacgtctgttgcgtcgtgcgccgcatcgggttctgtgtactgcctgcattctcggcaaaaatgggcgtcccagtgaaaccaaacaagtgataacgctgaaacgccctggtgatttcagtgtgcatatcgccgaattgactccgatgacactcatcaaaaatcaccgccacatgcgccccatacaccgggtgctgcttgtgcttggcaacaaagcgggaaagcttctgaatggtggtgatgatgatgcggacgtcggaatcttccaactgccgttgcaataccgccgtggacgtgttggagttcgccgcccctttctcaaaagactcgtactcacgcatcgtctggtagtccaagtccttacgatccaccacaaacaacaccttgtcgatcacgcccagaccgcatgccaattgcgccaccttgaaactcgtcagcgttttgccgctgcccgtggtgtgccaaatatagccacctgccgccaccgtacccaactgctgctgatgtgtggcagtgacaatgcgttgcaaaatgcgctcagcagccacaatctgataaggccgcatcaccaacaacttacgattggcattaaacacgcagtatttggtcagcacgttgagcagcgaatgcttggcgaaaaacgttttggtaaaactagtcaactcggtgatcggctgatttttcgcatctgcccaccaaatggcaaaagagaaactgttggacgtcttactcttactgcgcttgttggattgctcctccacatgcccggcgcgcaccgtattactgtaatacttggtcaacgtgccattgctgatcacaaaaagctgcacataatcgaacaaccccgaacccgcccaaaagctatcacgctgataacggttaatctgattgaacgcctcgcgaatatccacgccccggcgcttcaactcaacatgcaccatcggcaaaccgttgaccaacaccgtgacgtcatagcggttgccacgggcgccctctacagcatactgattcatcacctgcaagatgttgttgtggatgttgcccttgtcaagcagacacatatttttaatggtgccatcgtcgcgcttcaaaacctgcacatggtcttcttgaatgcgtgccgttttttgcacaatgccgtcatgtgcacccgcgatgcaggtactgaaaaaaccttcccactctgcatctgacagcgtgaccttgttgagcttttccaactggcgccgaagattggccagcaacgcggcctccgacgtgatcgacagatattcgtaagcctgcccctgcaactgcgtgatgaaagcggcttccaactccgcttcggactgataccccgcctcacggacacccgaggcctcgggtacaaactcggcaacaatggtgctctgctcggagcacacaatgggtgcatagcgaaagggtgggataggttcactcatacagcctccttgaacgtgagcaaccggtcgcggtagtacgcgtactgctggcggcgtgccgcaatctcggcaggcaaaccggccgtgatgtcattgaccagtgtgtcgaattgatcgagaaccgcaacgatgcgggcttggacttcgaggggggggatggggattttataatttttgatgatcccggaattcaaatcggctcgtgcaccctggcccaaagccttgagcctctcgtattccttactgacccaatgaaagacgtatctgtaattggcttgagtcgaatcaacttccaagttgcagcagtgttggttggtagtcagcggaatcttgttgattgcagaacgcgctgctgttgcacctgatatagctacaatgatgcagttggcaggaatccattttgccgccgattctttgagacccttctccgtgattttaatttcagtatccaaaatatccgtatatcggacttcctgggtacgcagccacggaatatcaccgccgtagtaatcagcacgagtagataatggcgttccgcccgacgaaacagatttgcaaatctcccccaaagtcatccacctgacccttgttgcagcatccgtgccctcctcaaacctcaaaagcgcgtcgcggtagtactggtactgccgccgacgcgcctctagctccgcctctagctccgcctctagcgtggtgaaagtgtcaagtactttcacgatttgacgttgtacttcgaggggggggactgggatttttattttcgcgaggctctttgccgaaacgtcaataactttagtgcctgtagcgtgtttttttttctccacagagaactgtggtgtttgcaggtagtaagaaagatatttcggatcttggtcgtgtttcaaaaccgtagcatgtccacctgtgacaatttggacttctccaatccacgcgactgccttgcaaacatcctcaacattttcgctggtgttagtaatgaccaaatctcctgggtcgaccttggcaagtttttcagcttttgatagcgagacaaacgacttcgttcgcgtcgtccaaataccatagtaggtgtaaatctgtccgtagtggatacacccaatccctgaatctacaaaatctgacttcggcattccattgccacgtactagttcacccaagtcaccaatagccttgtaatcaacgccgtttggacatagttgcttgatgagttcatcaatccgactcatccccgtttttttccgctattttttttctgcattactttcaccattgttagagacactgctaccacatcaagctgctggccgcggcgttgcgcagcgtcttttgcgtacgccgctgcggcatgaacaacttcttgctgatcactgaaactgcccgcagcgtgcacgttgcaaggcgttgtcttgaccgttgccggacaccctcacgatcaatgcccccaaagaagaacgccccggcttgatcatgtcgccgcggccttggccactcatcatggctccccttccagatcagccacgatggcatcaatctgcttcctcaattcggcttgtcttgcaacgatgcgggcaatgtcacgattgagcgccttgatgtcgatactctcacgcgtgtcggcgtgcgcaatgtaactggacacagcgatgttgtagccattagcggcaatatcgctgttgtccaccaaacgcgcaaaatgctcaatgtcctgacgcgcggtgaagccatcaaggatttttttctggtgcgccggggtcaacttattcttggtgccactgcgtacacacaaactggaagcatccatgaataacgtcgcgttatcgcgcttggacttctttaacacgatgatgcaagtagcaatcgtcgtaccgaagaacaaatcagccggtaactggatgaccgcatcaacataattattgtcgatgagatactgccggattttctgctccgcaccgccgcgataaagaacaccgggaaactcaacaatcgccgccgtgccattgaccgccagccaactcagaatatgcagcgtaaaagcgagatcggctttactttttggcgccagtatccccggcggtgcaaaacgcggatcattgatgagcagcgcgttagaatcgccatcccatttgatcgaatacggcggattggaaacgatcgcttcaaacggctcatcatcccaatgcgctggatcggtgagcgtgtcaccgtgtgcaatgtggaacttctcgtaattcacattgtgcagaaacatattgatgcggcacagattgtaagtggtgagattaatctcctgtccgtagaagccccggcggacctgatcgtgtcctaacaccttgacgaagttgagcaacagcgatccagaaccacaggccgggtcatacaccttattcacctccgtcttgccgaccacagtgatctgcgtcagcaattgagagacctcctgcggcgtgtagaactcgcccccagatttgcccgccgtggaagcgtacatctgcatcagatactcgtaagcatcaccgaacaaatcgatggtgttgtccgtaaacccgccttcactgctggtcaacggcaaatcgccgatggcctcaagcagcttgaccaacttttcgttacgtttggccacagtcgggccgagcttgctgctgttgacatcaagatcatcaaacagccccttgatgtcctgctcagaatcactgccaatcgccgagcgctcaatgttggcaaagaccttgctcaacgtctcattgaggttatcgtcacacttcgctccggcccgcaccctgacaaacagctcggaaggcaagatgtaaaaacctttttccttcaccgtttccgcacggccggactcggcatcggcatcgctcaattgggcgtagtcaaaatcgggatcgtccgctcggcgctcctgcgcattgatgtaactggtcaggttttcggagataaagcgataaaacagcatccccagcacataggtcttaaagtcccaaccatcgacactgccgcgcagatcgttggcgatgcgccagatggttttgtgcaactcggcacgttcctgctctttgttattgctcactcatgccacatcattctgccacggaatgagagagtttattgtcagttgcaacgccaagataccaagagacacacaacaccctcaccaagcgttgccacagccccaccaacaccgcaggtgtccagtggcttctaaacgcacatcttgcgtgagggtgacaggcgacaccgttcaatcacagcaaatgcgataacgtactcctgacattcctcaaccaccccggacaactgctttttcttggcgtcaataccgcggaaatcaacacaacaaccaccgctccttacagcccatgatgaaccgcggtagcactccaaaaccgtaccgattgcccagagcaccaccaatacaacgtgcacacaccccctttgcatatcgccccattccgccagaccccacctctgacggagtgtttcacttggacgtgggcgattgcatccagcgcgcgctattgatcttcattgatgctacaaacctagtttcttgaattttcatcatcacttcttgcaagagaacgcagccatgcatggtctctctatttatttcatactgaccgtgctgatgtttagcatcagtccggggccagccatgatgtttgtgcttcagcaatcccagaagaacggggttaaaactggtctggctgcagtgcttgggactgagattggcgtatttatttacgtcatcctcaccgcattgggtatcagtactgttttaaaagaatacccatccatttataccggcctgcaagggataggtgcggcctatctgctttacatcgcctacctcagctggccccgtcagaatgcttcaaaccagactcctacagcgtcccgttcaagttacacaggcaccttcatacaaggagtgctgattaacctgacgaatcccaagatcgttttgttcttcctcagtctgatccctcaattcgtcccacgagatagcaatgccatgacctttatggtgtacgggttgatcttcaacacgagcggcctcttagtgaacttctctgtcgctcttctggcagacagggtcaatcgtatgcttcggagcgtcacatggtttaactacgtgccgccgattctctttattagcatcgctgttctctcaatgaaggcacgtctctaatgcgcctgtgtcatgcgcttcatgcttgaaatatccgactgactacgacgatcgcacagtcccccttctccagaagggcaccgcactgtgtgcatttcagaaagacccctttagccgcatcaagcaagacaaaaacgttcctcaaaatgcaatcaagacctgcctgaatttcgctggagccacacttaaaaacattaatgcactgaccgaatgaccgcatcactgccgcaacgactctcaagccccaacacgttgaatggatgcgcctaacacccacatgacctaaacagctcaaacagatgatgtagcccattgaacactcacaatgacgcacgatgctgcaattcacccactactgcgccctgcacccccgtttgggagcgcaacattccactgctagactgtcacgcggcatgatccaccgcacattcccccatgagcaagcaccgctcccatgaccacagcaccgtgcatttgcatcgcccaggtcgcccaacccctgggcgtgaccaaggacaccgtgtatggctgacgcgagccacaccgccttggatctgtgtagacaacccaccgtgtccgcagtgcacgcatgaatccgcgcccgcggtgccgatgcagacaccgctcccaacacgcaaggaaacgcaaggccagcaccctcatgacacgcactgcactgacccaacgcgctcaccaacaacgcatcgccttcgccatcccgatgctgcatcgcaacgtagacaacaccacgatgcatccggcctgcggcactgcacgtgtcctgtggcagacacacgacaccagacgcacccgcggcaccgccttagccagccacagccgataccaccgcaagcgctggcaaccgcattgcgctgacagcacccgaccacgggaagacgcgccgcccaagcatcgtgctcactgcaacagattccctagcatccaggcctgaccgagatggaccatgccaccctgaccaccttgcgtgagaggcaccccgcctggcggttactgacctcaccgcatgcaccgctggtcgcaagctttctgcaccgcgtgttcgtcgcaccaaacgcgcgcatgatcagcgaaaccaagatcacccaggcactggaagacacgctgtatgcgctgcgtgaacacgaaggaccggaagcctacccgaagggcgccctggactacctcaatgactgggccgcacccgacaaaggctggctacgcaagttctacacaccaggcacggatgaagcgcagttcgacctcaccccggccactgaaaaagccatcctctggctgctatccctcacggaacgctcatttgtcggcaccgaatcgcgcttgctgacactgtttgcgctgctggagcaaatgagcaccggcaccgagaccgacccaatcaagcgcctggacgaactgcgcaagaagcgcaacgcactggacatcgaaatcgcccacgtcctggcaggggatgcaccgctgctggacgacaccgcagtcaaagaccgcttccagcaattccagcaactggcgcgtgagctgctgttcgacttccgccaagtgcaagacaacttccgccaactcgaccgcaaggtacgcgagaaaatcgcactgtgggaaggcaccaagggcgcgctgctcgacgaaatcatgggcgagcgcgatgccatcggcaattctgaccagggccgcagcttccacgccttctgggacttcctgctctccagccggcgtcgcgaggaactctccgagcggctggaccaggtgctagcactgcccgcagtggcggcgctgcatccggaaccgcgtacccgttacgtacactacgactggatagacgccggcgcacaaacccagcgcacgatcagccaactatcgcagcaattacgccactttgtggagagccgagcttttctggagaaccgccgcattctggacctgctgcacagcattgagcgcaacgcactcggcctgcgtgacataacaccctccgacacagtgatgtatctggatgcgatcggggcggacattcaactgccgctggagcgccccttattcaccccacgcgcaaagccgcgtctggctgatctggtccttgtggccggtacagacgacatcgacaccacccccttgtttaaccaaattgtgatggacaaagcacgcctgcgcttagccatccaacgcgcactgcacacccaatcgcagatctccctgcgcaccctgttgcaaaccgagccactgcaacaggggttggccgaactggtcgcctacctggagctggcccacaccagcaacagcaatgatccggacggtttgcgcggcatcgtcgacgaaacggtagaagagccgatccgctggcaggccaacaataccgtgggtgagacagtcacccgccaagcacgcttaccccgcatcatcttcgcgcggcgtgccctctcagatcatcagaaatcatcacaaggagacagagaccatgaaggacacgctgtatgagaatgatgtcgtagagaccccacgcaacgcactgccgacagtgcccgaactgtcgtacctgatggtgtacttgctcaaaggggtgctgtaccgcaaccaagaagaacgcctctggtccagcttgctgcgcctacagacacaggtcagagaacacaccgccgtgctgtggctggatctagtactggaccaagccgagggctacgccttcctaaagagccgccccgacccggacgccgccgaaggcagtgcccgcccgcctcggctgatcgcacgccacgcgctgccctacccggtgagcctgatgctggcactgctgcgcaaacgcatggcggagtccgatgcgcgcggcggcgacccccggctggtgctgacacgcgaggagattgccgaactgatgcgggtgttcttacccgacgccaccaacgaggcacggctcattgatcagctcaacacgaccatcaacaaggtcgtcgacctggggtttttgcgccccttgccctccccctccagcagcacaccaaaccatgacaactacgaagtaggccgcatcttgaaagcctttgtagatgcccaatggctggccgaattcgatgcacgcttggaggcctatcgtgccgtgctatcgggcgatcaagacgatcaagacgaacctgacaccagacctgaagcagaacgggagtcaggcgatgcgtgagacctccacactcggcctaaatttcgttgccgacgacaagcgcgtcggcttccggctacagcacctagaagtagtgaactggggcaccttcaacacccgggtgtggtgctacaccctgggcgggcgcagcggcctgctcaccggcgacatcggttcgggcaagtccacgctgattgacgccatcaccaccctgttagtgccagcgcagcgcgtggcctacaacaaggccgccggagccgatgcccgcgaacgctcgttgcgctcctacgtgttgggctactacaagagcgagcgcaacgatgccaccggcactgctaagcccgtggcactgcgcggtacgtcgaactactccgtcatcctcggcgtcttccacaacgtcggctatgacaaggtcatcaccctggcccaggtcttctggctgaaggactcgcaaagccagcccgcccggctgttcgtggtggcagaacgcgcccttggcatcgccgcggacttcaacaacttgggcggcgacatcaagaccctacgtaagaagcttcgcggtgcagggtgcgaggtgttcgacagcttcccaccctacggggcgtggtttcgccgacgcttcggcatccaacacgagcaagcgttggagctgttccaccaaaccgtctcaatgaagtccgtgggcaatctcaccgacttcgtgtgcagccacatgctagaaccctgtgatgtgggcagccgcattgaggcgttgatctgccacttcgacgacctggaccgggcgcatcaagccgtgctcaccgccaagcagcaggtgaagttgctcgtccccctggtcgacgacgtccagaagcaccagacgcagctagccagcattcaagccttggaggctggacgcgacacactgcggccctacttcgcacagctcaagggggaactactgaagcaccgcctggacgcactggcagccgaagcggcccagctaactgtggagatccagcacctggaagaacagcgcaaggccgcagacagtgaagtcacccaactgcgacaggcactgcgagacaacggtggcgaccgcctggaagaactggcagcagagattgagcaactggagcaagccaaggcacaacgccaaaagaagtccgaccgctaccaaacgttactgaccaagattgacgagacagcgccagccgatgcaataggcttcctcacccagcaacagcgctttgcgcaacataccgaggaattaaacgcagccattgagaggttgcataacgacaagagcgaaaaggatcgtgctctctacgatgctcgggaaaagcacaccaccctattggcagaaatcaacagcctgcaacagcgccagagcaacatcagcgccgcccagatccgcatccgtcatgatctgtgtatggcattgtccattgatgcggaggcattgcctttcgcaggcgaactcatccaggtgcgtaaggaggacgcacgcaattgggaaggcgccgccgagcggttgctacatggctttggcctcaccctgctggttccggacgcgcactacaaggctgtcgccacgtgggtgaacaaccagcagttgcagggccgactggtgtacttccatatgcgtccacgcaatacgacgcaggaggcggcgttacatgcgcaggcgctggtacacaagctcatcatcaaaccggagtcaccacactacacgtggctgcaacaggaacttcagcggcgctgcaacgtcgtctgctgtgacaccatcgagcagttccattgtgaggcccgcgccatcacgcaggccggccagatcaaggaccccagtggccgccatgagaaggacgaccgccatcgcattgacgaccgcagccgctacgtcctcggctggagcaatgccgacaagctgcacaccttgaacgcgcaacggcaacacctggaagacagcatgggcatgttgggacaagacatcggcaccattcaacgggaatgccagaaacaacaggaacggctggatgcactcaacaagctgggggagtacccggagtttgcggacatcgactggatgagcctggtccgccagattgccggacgcaaaaaggaacaggaacagctccaagccacatctaacattttgcaaaccctgcaacagcaactcacagcggcgcagacgcaagtcagcgtgctggagcgcaagtgcaagaacgcgtggcacgagcagggcgaggtcaagagccaacaaaaaacggcgcagcagatgtggaatcaggcccgtagcgtttgggatgatgcgccgctgagccaagcgcagatcacgctattggctggctggcgccagcaagcgctgggggagcacgtgctatcggtcgaatcttgcgacaaccacgagcagcaagttcgccaatggctacaaaaacgtatcgatgcggagaacgctcacctgagacaactaaatgaccgtattacaggcgccatgcaccgcttcaagaatcagttcaaggctgagaccgtggagatggacgcagacctggcggcgctgccagagtatgcgcggatgctcaacgacttgcagaaggacgacctgccccgattcgaagcgcgcttcaaagcactgctgaacgtgaacaccatcaacgagatcgccagctttaacgcccaactcaaccgtgagcgggagacgatcaccgagcgcatcaaggacatcaaccaatcgctgcacggcattgactacaaccaggatcgctacatcaaccaatcactgcacggcattgactcccaaaaggggcgctacatcacgctgctggcacaacccagcccagacgctgagatccgcgacttccagcaagatctacgggcatgtaccgaaggcacgttgaccggttcggacgatgaacagtattcggacgccaaattcctccaggtcaagcgcatcattgaccgcttccggggccgtgaagggctgtcggatgccgaccggcgctggacggccaaggtcaccgacgtgcgcaattggtttgtgttttcggccagcgagcgctggcgcgccgatgaaagcgagtacgagcactacgccgactcgggcggtaaatctggcggccagaaagaaaagctggcctacaccgtgttggcggcaagcctggcctaccagtttgggctgaagtgggatgaggtgcgttcagaatcgttccgcttcgtgattattgatgaggcgttcgggcgcggctcggacgagtcagccgagtacgggctgcgcctattccaaaagctcaacctgcaattgttgatcgtgacgccgctgcagaagattcacatcattgagccgttcgtctccagcgtggggttcgtgcacaacaagggcgggtgtgactcgcagctacgctgtctgtcgattgaggagtaccagacggagaaagccaatggaagcgcggcgggaggcgccgcccgatgagttgggccacaccagccagtctgtgcgcccaggtggaacgcctgtggaagcggggcgacttgctgcgggcgctggtcacggacacccacgccatgacgtggccgcaccgcctgacgctgcagacgcccagcgctgcggatctgtccaaccgcttccaggcggtgcgtgattgggtgcagaccatcgctgacaccccgcagattcggatccaatggggggaatggaaccaccgcgtccaagggacacaacggtttcctgaggccgtctatctgaacaccctgcaagcggccttggccttcatcggtaagacgcatcaagcgcagcagtttgaagcggtgtggcagcagaccgcagccgcgcagcccgtgctcctggcgtggttgttacgacgcccgatccaggcgctgaacgtggccgaccgctgggaacgtcttttagccgtcatcgcctggcttcaggcacatcctcgtccaggcgtctacctgcgccaagtggatgtgcccggagtggacagcaaattcattgagacgcacaaaagcgtgttgaccgcgctgctggacttggcgttgccgccagagagtatcgacacggccgccagcggcgtgcgtcagttcacgcgccgcttcggcttcctcgacaagcctgtgccgatccggtttcgtctgcttgacgccgcgctgcccggcctgccgggctgggcagggctgccggacatcagcctagacgcggctcacttcgcggcactgacgctccctatcacgcgcgtcttcatcatcgagaacgaaatcagcttcctcaccttccccaaggtggccggtgcgatcgtcatcttcggcgctggctacggctgggaacagctggcacgcgccgcgtggctgcatgcctgccaactgcactactggggcgacatggatacccacggcttcgtcatccttaaccggctgcgtggctactttgggcacgtgacttctgtgctcatggaccaagacacattgttggcgcatcgcgtgcactgggacgaggaatccaagccgacacgccaggccttggagcacctcaccacggaagaggctgccgtctacgatgacctgcgatacgatcgccaccagcccaggctgcgcctggagcaggagcggattggctttcactgggtgtgcgatcggctggcctgcttgctctcagcaccaccccaggatgcgtaagctccagaagcggcggtgcgctggggcaacgctccgccatcaatcacaacacccccacccccgttcttggttagtgctcctttgcgggttccgtgcacctggcgggctgctgtgctgcgtctgcctgccatgtcgagcatgagcagcatgagctggctcgttcgcttcggtgctgcgcgatcttctgtcggaacctgtgccgactgcttcaccgcagcacacgtagccagtgttgttcatcaaccacgtgtgagggtgccaataagcttgctcaatatctggtgaagggataacgaacgcactcaccgcgcacggcatcgcatcgtagacagggtcacgcgttgcggcatgaccacgagtgcgccgtaggcagcgtcttgcgactctggcaggcccttggtcttaaacaggtcgctcggcttggtgctgtccaaaccggcgtgccgcatgatgcgatccaccgtcatagattcacccttgaacgacccgagcagctcgaacacgttgctctgagcgtctctaaatcgaaccgactgggcatcgccatccggcagcatcacctaatttgaagtgcgcgaaaaacagcggattgccgcgtgtggtcagtatttgcaacacgcacccccatccactccctcggtcgccgcacctgtcgcggcgctccctacttgttcggtggacgacctctgggcacgactttcgttgatgaacgccccgggcagcagcgtcgcgcttggctggaaagcgcagtgatctagccgattcagcaacgcgtttccggacgcctgaaggtcgcgcgctgttcatggtctgcctgctggtcgcgatgcgaccggcacaatgcagcagcaacagcgccggccagttcaaggaagggatacagaagagcgtgctgtggggacggtgccaccgggtgcgatggccagtggggaattccaaatccctgagtcaggagggagcccccgttcgttggtgatatgtatcgctttttatcaggggtgttatggggatgcgactgatgctgggttcagaacatcggtgagcggtacgggatcaacaggagtaaggagcagcaaggcgcgctggatcaggtcgctgcagggggcaggaagaggagggtatctgcgagggtgtctgcggtcgggtgccggatgcatctatccacgggtgctgtctgccgcttagggtccagaagcactccactgggacgagaaggcttcggcctgctggaggacggtctgcacagccgtgttctgtagatcaggcgggtagccgtacttgcgcaggatgcgcttcactaggacacgcatccgggcacgggcggagtcacgatgggcccaatccactgagacgttttcgcgcaggcgcatgagtaattcgtgagcgatcagccggagggtatgatcacccatcatctgtacagcgctttcgttttcggccagtgcgtcgtagaaggcaacttcttcatcagacaatccggaggcttcgccgcgctggcgagcagcacggatgtctttggccaattggatcagttcctggagcacctgggcagtggtgatcgcgttggcgtggtagcgcgccacagcaccttccaggcgctcggagaaggccttggtttgcacgaggttgacggtgctgcgggaacgaatgcggtcgttcaacagcttgcgcaaggcttctaaggcgaggtgctttcgttgcatctgctgaatttcagcgagaaatgcgtcggacaggatggaaatatctgggctgttgattccagaagccgccaggatatcgacgatctccgtcgagacgacggctcggctcacgatctgctggatggccaggtcacgttgcggttcgctgcccccggaatgatcggcgctcttgacgagggcggcacggatcgcctggaagaagccgacgtcttcgcggatgtggcgggcctcatcggaggccgatgccagggcgaacgccttagacaacgctagcacggcatcctgatagcggcggtgggcctcttttttgccttctttggtctgcgctatggctgccagttgctgctgaagattgagtatccactcaatggctccacccatcatggcaaggcgctcttgtggggtaccactcattgcggtgtggtaatcgtagccgtggtacatatcccggacgatctggtatttctccatcatgagtgcgatggcctgtgcttcatcaacaccggtgtgttgctgatcgttcttcgaatactgttgcagggccgttctgagattttgtgcgatgccgatgtagtccacgatcaatccggcgggtttgtcgcggaacacgcggttcacccgtgcaatggcctgcatcaatccatgcccttgcatcggtttgtcaaggtacatggtgtgcatgcagggggcgtcaaaaccagtgagccacatatcccggacaatcactagtttgagtgggtctttggggtcacgggcacgttcggccagcagatcacgccgggctttgttgccgatatgctgtcgccactgcggcgggtcactggccgtgccggtcatgacgattttgagcgatccggccttgtgatcggtgctgtgccaatcgggccgcagtgccacgatgtgatcgtatagggcgacacagatacgacggctcatacagaccaccatcgccttcccatccagagcggccaggcgatcttcacaatgggtgatgatgtccttggcgattaaagcaagccgtttatcactgccgactaaggtttcgaccgttgcccattttttcttgaagcgctcttgctcggcctcggaatcggcttcggtcagtgcgttgacttcagcatcaatctgcggtttctcggcttcatccagtgcaatacgtgccaaccgcgattcgtagtagatcggcacggtcgcgccatcttcgaccgcacggctgatgtcgtagatgtcgatgtagttgccgaatacggctggggtattgacgtcgtcggcctcaatcggtgtgccggtaaaaccgatgcaagatgcgttgggcagggcatcacgcatgtacttggcgaagccataggagattttgccggttttggtgtccactttggctttgaagccatattggctgcggtgtgcttcatcggcgatgacgacgacattacgtcgtgtggtcagtggttctgtgatgtcaccgaatttctgcaaggtggtaaaaatcactccaccggatgcacggttcaagagtttccgcacctggtcgcggctctgggcctgtaccggggtttgccggattaaatcactgcactgtgagaatgtggtgaataactgatcgtcaagatcgttacggtctgtgagtacaacaagcgttgggttggccattgcggggtgtttgaccagttgtccggcatagaaagccatcagtaggctttttccggaaccttgggtgtgccagatgacaccaatccgttgattcccctggggcgaggaagccgccacggtgctgttgatggcctgccgtacggcgtggaattggtggtaaccggcgatgatcttcgccaagccagcatccgtcttccggaaaacggtgaaatggcgcagtaggtcgagcaggcgatgcggctcgcatatcccctcaatcagtgttgcaagttccggcaccccttttggagcaatgtcggtgccgtcggtggtgcgccaaggcatgaagcgttctaaatcggccgacagcgcgccgaagcgggccgtcatcccgtcagaagtcactagcagggcgttggtgttgaacagtgccgggatctgctctttataggtctgcaactgattgaaggctgcaatcaaggttgcattgatacttcctggtgccttcaattcgatcacggccaatggcaagccgttcacgaagaggaccacgtcaggacgccggttgtagtgatcagcaatcaccacgaactggttcacggccagccaatcgttctgttgcgggtggtcgaagtcgatgagcgcaacgttgcccgctgtcagggtaccgtcctgggcatagtattcgacatcgacaccttcggtgatcagtctgtggatgcggcggttttcttcgagtaatgatggcaactcagactgtgtgaccttacggattgcatcctgcctcgcctctggtggcagccctgggttgagacgtgcaacggcatcaacgaagcgttgtttgaggacaacctcgtcgtgactggcgcgttccggacgatagccatcagggccgatgttttcttcacgctcgatgctgtagcccagggcacgcagctgttccagcagtgcttgttccaaggtggcttctgataaaaatgccattgctgttctccttgagtgcttcgattcgctgcacaacagcaacccaggctgggcgcagcattcaacgtttcgacattggtatcccccgaattgctaaagcaatcggttggcttggatgttcaacggtcatccgtcgccgccccaccgtaggacacgcacggtcggtaaaccgccattatcggcatccccggcacgtcccaggtgcgcatcaagccgcgcggagtgcactgcgatgcgcggccacagcgtggggaaacgcagcaggctgtccttccagggagaccagaggcaagagggccacaataaccatgcactgcaaggacggccgtacgccggtggtgcatcgccagaagctccagatcaacggcgttgccgtcgctagcggggtctggtttgtggcgcagatcgctcggtgcgtcggtccgtgtgtggtggctcggcagccatgtgttgcattgatcattgcacacgtcaccaggctgaagggcacgcattgcagcgactagcccgtctgccaaggtgggagggtgcggcgtggatttgcgtggggcttgctgggggtggagacgtttcaccgcacctggacacctcctctccactgctgttttggtgcagtgcatggaggcgtggatggaggcctggttctggtgatccgggatgcgtggcggccgttcgaaggattgctgcggcagcggtgcattgtgccaatggatgtagcgtgcatggaggcaggggcatccatccaaggtcatagggcggctccggtgatgcgctcagcatccggtacgcgcagttcgccggagataagtttgggtagcagggtgtcgcggagttggacgagggagcgggactcatgaatctttatgatgatttcctcactcagtgcctgaatgtgttgattgaatgcaacagccacatcctcatgtggcagaacaactgggtactgtgccatttcagaccagcttgtacgaggcatcttcgttcccgttgaaccagcgttggtgtattccacaaacgcatcacttgacacatgcacaagaacgaaaccaaaccatgtaggcaagataggcgcaataacgactatgtcagttgaacacactccgtcaactggagcgacaccaactttatgaaagtacggacgtaatttcccaaataggatttctccctgcttaaactcgtacttattactttctatgccattcgccacaccccattcggcaagtgcgatgcaacgcttgggcatgtgttccagtgcgatataggatgtttcatctttgatttcactcggctgcacactacgacgaagatgcactgcgacttttcccaatgagtccacacgccacccctccggaatctccccccactccgattcaatgaggcgggcaggaaagaggtcatacagatgtgcgggcaagccgggcagtgattcgccgcgctgccaacggccttctagcttggcgcgcaccggctcaaagtccacacaccatgctttgaacaaggcgcgggccattgcttccagcgtttcatttgtacgtcggttaagttctattttgtcgtccagcgtgccgaggattttggcgatggcgtgttgttcatgcttaggggggacatctaactcaagcatgtacaccgcagcacgagtagttgacgggattggtgagccatcatcaacttcaccaagcttgtaatgcttcactgcatagtaaagccaacgcatatccaaatctgtcttgggaaccaagtaataagcggtgtctatcacccagaatgattcatgacagaactcaactccccgatatgcacctttccgccccagtacaacacccggcccttgcgtcatcgcataggatgtccaaccaatcgggccatttgagccaaaaacacgacatttcccgtgagtttggctgtaaccacggatcgcttttccatattcgagggtaacttcgtctccccaattggatgaacgccactcacccaccatacccaagctccttcagattggccgcaatcgccgcgtccaacttggccgccgccgcgcgctgcgcgcgccactgtgcggaaagccgctgcatcttttgcgggaagggctcgccgtcatcttctcgttccaccgcgccgacataacgccccggcgtcaacacataaccctgcttgcggatgtcctccaaggtggcggatttgcaaaagcctgccacgtcggcataggcagccgcgccttgttctccacgccaggcgtggtaggtgtctgcgatctgctgaatgtgctcatccgtgagttcacgccgggtgcgatccaccagcacacccagcgcgcgggcatccatcaacaacacctgcccgcgtcggtcgcgcagccctttgccgggatttttattacgcgccagaaaccacaggcaggccggaatctgggtggagtaaaagagctgccccggcattgcgatcatgcaatccacgatgtcagcctcaatcatgtgtgtgcggatctccccctcaccagagtggttggagctcattgagccgttggcgagcaccacgcccgccgtgccattgggcgccagatggtggtagatatgctgcaaccaggcgtagttagcgttgcctgcgggcggcacgccgaatttccaacgcacgtcctcgcggaggcggtcgccgccccaatcggaaatattgaacggtggattggcgagaatgtaatccgctttgaggtcgcgcagcgcgtcgttgtgaaaactgccttcgttgttccaacggatatcagagtcgataccacgcaccgctagattcatcttggccaggcgccacgtggtgtagttcgactcttggccataaatcgcaatgtcaccgatgcggccgccatgctccaggacgaacttttccgactgtacgaacatcccaccggagccgcagcaggggtcgtagacacggcccgagtagggttccagcatctggacaagaacgcgcaccacagaacgcggggtgtagaactcgccgccacgcttgccttcggccccggcgaattggcccaagaaatattcgtacacccgccccagaatgtctttggagcgggcaccttcttcattgagcgcgatgccagaaatcaagtcgatcaactcccccagcatcactttattgagcgccggccgggcgtagtccttgggcagcacatgcttgagggaggggttgtctttctcgatatcgcgcatcgcttcatcaatcaaggtgccgatggtggactgtttggcgttggccttcagatgtgaccagcgggcctgcttgggcacccagaacacgttatgtgcgaggtactcgtctttgtcttcggcggcctgggcatcttctgctaatagtgcgctgtgcttggcctcgaaggcatcggagatgtacttcaggaagatcagcccgagtgcaacatgtttgtaatcggaaggctccatattgccgcgcagtttgtcggcggctttgaagagttcagcctcaaagccgagggtgccgccgttgccgtttttcgttgttgtcttgcgatgggccatattgatttgcgttcttgattgctgcggaggcggcgttgtttcaagagccacctgctttcattggggtgcatcctacggtaatcaccatcggttgcggcatctctggagtgccggcctggacaacgtcacaatgcggtgctgctggcgcagcctgtcggaaatcagtcaaacggcggttttaacatcgacttgtggcgtgatgcagcagcacacgttgctgatggtgagcaacaggccatttcagcgtgagccgtagcatcactgacgcggggagtcagcggtgttccgggggatgagggaggttgcggcacccccgaatccgctgcgcgatgagtgaacgctggatgcccggaacgccgtcaatccagatagacaagccctgctgggcacccgtgcagtgctagccactgcacacgttggctgtgtaaaaagcgagcaggcacccgtcaacatacgcgcggacagtacgttgctgcgccgtccaatcgccgctcaccggaagttggtgggcgaggaccgcagccactacagccagacgtattgggtcaccggcattaggtttggaggactctgttgccgcgccggcgctgcctcttgccgcgtcgctggagggaaatagtgtgaggtgcgtcggtgacgcgaagatcactttctcgttgcggtctttcatgcgcccgctcagaaacatgtactcgtgcgtctggaggagtccatttcaagaagcaggaatgtctgcgcgcacggcgtggccggtgcaatgcggaggaaggtgtgcaagaacaggtcaccgaccactccagccaccggctccgctaccgcagcattgatgccaaaggcatgaaagatcggcgcggtgtcctgcttggtgatcttgcgagccttgcaatgcgcctgccagtgagtcccatgactgactgccgggacacgttccacgcatcagcatctctccccccgattgagcattttggtttcccaattccgtcaaccacatcggatgtccacggatgccggagagtgctcagaatcaatacctgtagccccatcttttgcgcacgctgttccctgaacattcctggcaacgttggcagcgagagtattgatgcacgctgctcattccacgtcaggcgacttgaatcctgacagcactctgaggacggcactcagagtatgcgcaccctatagagtgctcagctagcttgcggcgtggtggccgagcacagcccctgaggcgctattgaagccgacgctcagactgtctggcctgctgggctacttgggttgctgcggtaggcggtcgcgtagaaaccttgtccagatcggcgttgacgccgctacggtgcagcttgccgcgggcgctgagggcgctgcccgcggtgctgatgtcttttactgatctgttactgctgtctggacagcattcaccgcttttgaatgaccaccgattgcaacacgctgtccatgagtttacgggcacgctggtaagcctcggtgttgctttggcgttctgactcagaaaagttgaaatccaccgtgatgtagtagccggtatcaccgatcggggtcatccaggtttccacgccatcacccagcggggtcggaagatacgcgcggtaccaggtccagggattgccccagcgcgtctcggtctgcggggcctccagaaaagtaaccttggatgtgacaccactcattttaagtttggatacgagggcactactgcggctatagagggcacccatggcttgctcatccgcttgctgagtttttttcatcagttccgttatttcctgaatattctcctggatactttggctggcggcgctgcggatgccgaaactgatgtcgttggaccccacaaaccgcgctctgcacagcggatgaaatctcatcaccgcattcactctcaacaccctgacgttatgcaaagggcgcgtggtggtgggagtcagctttttggcaccgatgatagaggcatccagtgcaacaaccgtcggctgttgaccttccaggttgaccacgattcccgggacctctgttccatgactgtgctgcatcaccatctttacattgtcgggcggcgcgcctggataacagcggtagatgttgatgccattgataaaggcatgcttgatggtgtactgatctaaaaaattcacctgaaaatgttccagggtcagatcgcggctctccttaggtccggccatcatgaccggcgccggtatccgggtcgatcacgggagcggtgctgcaagcggacaacagcaggctggcaacacagattgatacacacagtgggattcgcaatttcataacagtgtctccttacgttggggtcaatggttggcacatctttgcctacctccctcttgaggagggtacgctcagcaatgttatcggtgttgctgaggaggccggatcggttggtggtgaggctatcgccggccaggtgtgccccagcaacgcggctgtgctgttgcccctgcgtttgcatggcgctcaggtcagcggtacccgacgtcagcgagcagcgccgggggcaaggcagggggcagtttcgacaggtgcaatgtcactcaggtcaggcggtcgggaagtttggggtgactcatgtagcgggcatagatggtctgcggcatggcatgagatgttggggtgttggggtgttggggtgttggggtgttggggtgttggggtgttggggtgttggggtgttggggtgttggggtgtttcagtcagtgtgggcagggcttcatggggttggctggcgtgggtggcggcttcagtcggtggtctctgggatatcccaatccgctggtttagcttcgccggtttgatagaactgtttgacgcatttgatgtattccagaaagtcgcggttctcggtggcgagccggttggccatgtcccaatcgatgtcatcgcgttcacgggctggaatcaagatctgactgtccgcaggggtgtcgctatccagtttgatgaggccgatgccgtgggccgcaaataacatgcgtagttctttgagggtgtgtgggccttcaatctcggctgcaaccagataggcgaaattggcccatgaggaattggagactgtttggaagaaacattcacgcacattcgacatgttgatcagcaacttgacttcaaaggaccacagtttggtgcgtttgtcggaatagtggttgacgcaatcgcgcacttgttggtgccactccacgcccaaatcctgcatgccgaccacatcggggtacaaccagcggttgccgttggggccacgcttgttggatgaacgcttttcgtcgatacgctttgcgtagacgccacattcatccgaaagatagcgcgacagcagcgggtagagtgcatgttcgcccgtcgtcacgttgccattggcctgcgtggtgggcttggtggcggtgctttccgcggcagccactgcggcaatgtctgtttgtgtggtgtagtagtacttgcgtggtctgccttcggtgaccttcagttccgggtgtttcttctgcaagctgggacgccgggaaccaatttccgcaaccaattgttggattaggtcgccgtcggtgttgatgtaagtggcttggctattggtttttttctgctgacattccgcaggataggtgctgaagatccattcggcgatctgccgtgcagtgaatttttcttcgtggcgtgtttgtacgcaatccaatatggctttccccagatttaatgtcattgcactctccttgagtgtctgaataccttgttgaggtgctgcacagccaatatcgatctttggtctgtgctgtgttggctgcgctaggcaggatcgcgatttggcctggctgaaaaaccggcgttggttctgaaggaggagccgcagcaacgcggcaataccgcgtatttgatcacattatttatggttaataaaagcatcaaggctgtatgggtggccatgcgatatatcgctgttgactgtgcaggacagcaccgcatcggcagcgcctttcagtacgccgttgcgcggcggatgtgggatgtggcgcattgcaagaaggtggttgggccgctggtttgatgctggcgctgcgatctgtgttggcgctgcgcccccggaatcaacagcaattcaggtgacacgcgactgggtgcacatggaggggcgctgatgtctgtgggacgccggcatcagcgtcgggaagcagtcgtcttcctctgttgatgcggtgatccaagcgcaccgactcagtgagcagcccattcggtgctgcaaacacgccagaaacaccaccgcgccgctgcatacgcatgaatgtgtgtgcttgctgggtttctagtgtgcagccgctacgggggaggtgccgcaatggccaacctcacggcctggaaggtgcaccgcctgccaggtgccatccgctgcgggggtcagttgcgtgaggtccacactgcaaacgcggcggttttcacgtgcaaccacttcgtaatgcgcacctgccacgggcacaaagctatatgcaatgttgcagaggttgacgttgatgacattgccgccgctgctccacggtgttttttgggggaagagactggtctggaaagaaaatgcagcggtgattggctgagcagcacgggccgcaatctcgatatagtgccgtggggtctgaaggagtttgggcatccccagatcacgcttgcgctgtccatacatctgccaaccgttggggtagccgctgccgggggcgcctggattgacgcaggtgctattggggtagaccttgacctgacgtgagccaatcaagcggatgtgggccagttcgccctctttaggttcggcgtaagaggagaattcatctttaatctgatcaccaatggaggcgcatccagttaaccagacggtccccggtagtaatgcagtaagacatatcaggatgctgagtctcatgtttcacctattacattatttaatatcgtgatcactatagacggtcactaagcacatcactggctcatgcagtatttttatttgcgcagtcaatgtatggaaaaaaccggcgtggcagtgatctataaagtttcagattgcaggcgttgagaaggccatagcgcttgtccgaataatttataactatctattcactccagaatagcttgcatgtcggtatttaatgcgctgcgctatcaactctgggcgcacgcgtgctgacatcgatactctgaggcgattgcatggacggaatcgctgcattagcatgcaacgcgcataacattaattcatgatgttgctcactccataggcagcacgttaatccatcggttgcaatgcggcccctgcccgctgccactggtgaacagaaaatagcttgaggaaagggatttctcttcacatgacacagagtttacttcttaccaacaacaaaacgagtgtccttgcgggcacagtgatttgcaatgctgacgttgttgctgcatcgcaaggtgtatgtgccgcatcccaccgcgttttaaatggagtttaacaatgaagatgccctgacgattattcataactgcaatgctgtttgtcgctcacaccgtggctgcggcggagtctgaatcagaacaagaccgatggtatacctctgctttattggaatatgcaccttgtgccgggaaaaatttctcatcgtttctcgacaagttctccaatgacgccagcatccagcgggaatacacggaatacccactgagaatcaaggaactggatctatccgccgcgccggaagtgagaaaaatcatcaactacttgagaagcaatcaaatctcccatcccgtacttccgttgcgtgccacacgggagaaacaatcattgaaaatgcttgaagtgcggcaacgctatgtcaatgaaaaccgtaaagccatccttattaaaccgaatacggatgatgtcacggtgtacgaattcgtgaaggatggctgctggcatttgtggtctatggatcatcaggcatccactgcgcgccatccacagctgtattggatggatgcgatattccccgcgatggataattgcacgccgtattatttttattttgacccacacaccaagcgcactagcaatggggtattggaacgcaagggatatacgccttatcaggttgaaaactctgttgcaaagtacaaagtacatgacaagtttatgggcctggatgccacggaaatcacaatccccaccagcccatacggcatgtataaggtgacgctgccggtcagcgtagaacgtcttaccgcggcggtggaaaaaaacaccggccatcgtctggccattgcgatccccgaatttaaatctcaatccggagtgccctaccttgtagaggaaggcaaaaacacctccagttttgtatgtgcatttgatgcccgataaataatgcatcttgcggcacgttgtttgcactgttggcgttgtatgcaaccccgttctcaatggagtttaacaatgaagatgccctggagattcatcatcaccgctattgcactgttgtgtgtggctcacaccgtggctgctgtggcccctgcctccgcagcagagcatgtgcaggccgcagcaaaacccacggtgtcgtgccctggagaagatttcacaacgttttttaaaaaattctccaatgacgtaaacatccagcgggctttcaccaagtatccgctgagaatcaaggagctggatttgtcggctgcaccagaagtgaaaaaagtagtcaagcatttaagaagcgatcaagttcacttcccggtgtttcctttaaaggcagaaagggagaggaaatcattggatattattaatggcacgggaagatatttaaatgaaaacagaaaaattatattaatccaacctaatacagattatttaatgctttacgaattcgttaaaaatgactgctggtatttgtcatccaccgataatcgctcattcactggtggccaacaagaactacactggctggataatatttatccatctatggatgactgcactccatatcatttttatttcgaaacagaatccaagcgcaccagcaatcgcattttggaacgtaagggctattctccttataaggtcgatgaagaggttgcaagatataaagtacatgaaaagtttatgggcctggatgccacggaaattgcgatcccatccaacacatacgcaattcatatgatcacggtaccggtcaacgtaaaacgttttgctgcagcgattaaaaaaacaaccgggtatcagttgaccattgcagccccagggttcaatcctcaatcaggggtggcctacctcgtagaggaaggcaaaaacaaatcaagttttgtgtgcataacgagtgatgaaggaggattttaattatgcctatttataaccccggttccgattttcgcccagggtctggttatggtcctaaaaaatatctaggtattctatttcatccaattttaaatggagttcaacaatgaaaagagtatggagattattcatcgtatctgtgttttttatggctcacaccgtctctgcggtcgcgcctgacgcacagaaaaatcaatcgcacgctgcaacaacatctaacataccctgtcccggaaaggacttttcatcgtttcttgaaaggttctccaatgacgtcactatccagcgggctttcaccacgtctccgcttatacaatatcaagttgatgtcactgctgaaccagaaccaaaagaattcaaacgaattttacagcgcgagcaaattgaatttcccgttatgccgctgagccaagagcggagcaaaatacccttagacattaaagtcattaaactcacctcaaacaaggctcaggttcgtgtattcaaagaagatacggattatcaaacatcctatttcttcaaaaagaaaggctgttggacacttgtaaaaattcgctatgactcactgtaaataaattaaggacagattaaatgacatttaatgacattatgaatagggtgcttccaccacaagataaatcatcatctcatcgtttggtttttctattgacgatgatttttttggttttcttgccaaacgtccatgcaaataatgtacaccccccaacaatcaaggcctcgaaaatgataccagacgaagatagagagtatgccgagtcgatgtttaaagaacatcctgaaattttcccaaaggaaaggcgatcatccatattacatgggatcatcttattggggatgactccctttgaagcaaaattagccggaggcgctttcttctataaggtgactgccgacacatcccgatggccggaacatagtgatccaatgaaagtaatgtgggcgcaatcgataaaaccagataatagcgaaatctggatgacctttaaaaacgcttaccagtttcctggtgaaggtgatattccatttcgggttcacttcaaaaaaggtcacgctgtcaacatagagaagctggataaataagatgtcaagaaagattttcactcgcggtatcttgttactcctggcaacggtattcctggggctggccacagcgtttattttcttttatggtcctgattttaatagaaacgatccaagcaaaccaagaatcatcttaccttttgatcttaaaaaagtgggtgaaacatattcgtttgacgtaaatctcggggggccgttaacttgctctcttgatgtaaaaattttcattgctgctccaaataaatggtcccgtttgcttgataaaaacacagagattgaagaagagatgcgtttttatgacctcctgggcggctcgaaacttattaatcacgaatggattgaaccaggagtgcctgccaagttccgaattcaattcattcaaaaggaaagcaacaaagttattctagataaaatagtagatcaccccagaactgggtcgagttacatgggaagatatgctcttttggcacaagacacgctccaggccggcacatataccatccggcttgactatctggagggtgcgccagagcttgcgcctttatatgccgagattcgatttagcagagcctacactggaaaataaaacaaaggagattatatgtatacggtaacgattaatattgctgatagaggaacatggctcaagaatgcgggggtaacaaacctggccaatccgctgtggggcatatgtggtatgaaatcagtgatggaataaataataatagctatggctttgcgccagataaaacccatcatggcaatccattcaataagaagaaacatggaatattacaaactcatcggaaatgaaatatgagaatctcacctctttccatacaacacatactcttgattaattttctttttatttctctcgcatcaatgactggatgtgaatcaaaggagaaagatcaaatgattaaagaatatatacagaatgacttaaaggtcggccaggttgttcgtgtcactgatctcaccaaagtgacacatggaatggtatgtaccctttacccttatcagtcatacattgacgaaaaggttacgcaaagtgttcatattaatgcatacctaaaagcatcagggtatatcgcagatgagtcacattgggcctttgttattgctgaaactgaaacagtcaatctttatcagttcaagcgatccagaaatctggatatccttgccagccatgaaatccaatctgaacacaaaacgaagttaccagaacactttaaaccagctaattgtgcatctttagaaaatgcggtattcacaaaaatcgaatcaaaaaataaattttttttgatcatgggagaaattaaatgaatggatatgaaagtctttataaccgttacatgcaagaggctaatacatacgcaacctattacggacttgatccgagcactgcacataatggtgaatgggatgcttttcgtcatgcgtatgccagtggagcgatgactcgggaatatggtgaaacagcagctcatctttttggagatttgaacgagatacgcggcgatttcattcataaccagcctgaatatgaaaagaatatggataaatggaataactctgttggccgtaatattgggaaggattccgcaagtagcgacgagattgcacgtcgcgtatacgatgcaatgaagcgaggtcacctcattacagacccttggaatgatacccgtcgctataacgaaagaaatcaaccagataaaggaaacaaccgtgatgctcttggcgacagcgtcggcgacaacagccacgggacaggggcggcgggtggcccaggggcaggtggtgccagtgttagcaaacggatcactccgctcccgccgcgcgatccgctggcgttggatttggacggtgacgggatcgaaacgacaggcagtgatggccgggtcattctgttcgaccatgatgccgatggggtcaagaccggcaccggttggctgaagccggacgatggttggttggtgctggaccgtaacggtaacggcacgatcgactccgggcgtgagctgttcggcaccgatactctgaaacgcaacggccaattggccacagatggctttgatgcgttgcgtgatgtcgatagtaatcaggatgggaagatcgacgcggctgatcgtgttttcgccaatctgcggatttggcgggatctgaatcaagacggcatcagtcaggcgaatgaactcagtacgctggatgcgaatcacattgtttcgattggggtgacggcaacggcagggcgtgttgatctggggaacggcaatgtgcagacggcggcggggacgtttacccgttccaacggtacgacgggggccaccgagggcaccactggcacggccgcgaatctggatttgctggctgacacgttctatcgggatttcacgcaacaggttgcattgacggatcaggctaaggcgctgccttttttgcgcggctctggccgggtgcgcaatctggacgaggcgatcagtctgtccaaggatttgggcaattgggtacagagttatagtcagcaatcgacacggcaagcgcagctggatcggctggatggtttgatggagaaatgggccaacacttcggacatgcagtctctgcgggcgcaagcggaggcactcgcttccaagggtgtcaccgtgacttatgtgctgtctggattaaacccgggcacagcggcttatcaggatttcttacgcaagctgggcattgtggagcgcttcatggggttcacttacggtggtcagcaaggggaggcacgttttacgcccttggatgccacgtccggcacgatgaccgtgagtttgtcagatgttcaagtgaccaatattgcattggcgtatgagcgcttcaaaacagatatttatgaatcgctgctgctgaaaaccaggatggaacccatctacaacctggcggaggaggattttgtcaatggcgcctgggtcatggactggagcggtgtagaacgggcgctcaaacagggaattcagcgtcatccacgggatgggatattggatgccattgagtttgtgagtgctctcggatacaagaccgcggaacggctggggtggaacgcaatcggttttctcgccgaccaactcagtgcagcgccggatatgggagcattcgaccatgaatccagcagttggacggtgatttttgccgccgccgaccgacatttcattaccggcagtgcgcgctcagatgtgttattggggacatcaggtaatgacatgatcataggagaggtgaccggtaacgacgtactgattgggaaaggcgggaacgataccctccaaggcggaagtggggacgacaccctggacggcggtaccggcaatgacacgctcaacggtggcgccggtaacgatacgtatcggttcgccatcggtgccggggtggatagtatctatgaggatgtcactgccacaagcgataccgacatagtgacgtttgccgatgtccgctctaccgcgctgactgcgctggaacgcaaggattacgacctggtgatcaagtacggcactagtgaccaactgaccatcaacaattatttccacccctgctactcgggtgccaagattgagcaattcacgttcagcgacggggtgacctgggatgacgcggccatcaaagcacgcgttatcagcaacggggatgccagtaacaactatctccgcggttacaaagacggcagtaaccgtatttatggcctggatggcaatgacgaaatttatgggggcgcactggacgatatgctggacggcggtgcaggaaacgacatgctcagcggcggcaaaggtgcggacacgctggacggtggtagcggtaatgacatgctctacggcggcaccggtaacgatacgtatcggttcgccattggtgccggggtggatcggatcgaagagagcgatgcgacggcaggcaataccgatgtggtgaggtttgccgatgtggcttcctctgcgctaaccgcgctggagcgtaaggacagtgacttggtgatcaagtacggcactagcgatcaactgaccatcagcaactatttctattcggcagagtacaaggtcgagcagttcacgttcagcaacggggtgacctgggatgaggcggccatcaaagcgcgtgtcatcagcaacggcgacgccaataacaattacctcgttggctacaacgacggcagcaaccgtatttatggcctggatggcaatgacaccatctatgggggtgcactggacgatatgctctacggcggtgcagggaacgacatgctcagcggcggcaaaggtgcggacacgctggacggtggtagcggtaatgacatgctctacggcggtaccggtaacgatacgtatcggttcgccattggtgccggggtggatcggatcgaagagagcgatgcgacggcaggcaataccgatgtggtgaggtttgccgatgtggctttctctgcgctaaccgcgctggagcgtaaggacagtgacttggtgatcaagtacggcactagcgatcaactgaccatcagcaactatttctattcggcagagtacaaggtcgagcagttcacgttcagcaacggggtgacctgggatgaggcggccatcaaagcgcgtgtcatcagcaacggggatgccagtaacaactatctccgcggttacaaagacggcagtaaccgtatttatggcctggatggcaatgacgaaatttatgggggcgcactggacgatatgctggacggcggtgcagggaacgacatgctcagcggcggtggcggtgcagacacgctggacggtggtagcggtaatgacatgctctacggcggcaccggtaacgatacgtatcggttcgccatcggtgctggggtggatcggatcgaagactacgacaccactactggcaatgcagatgtgctttccatcggtcagggggtaagcatcaatcagctttggttccaacatgtcggtaacgatctggaagtcagcatcattggtacgggggatcagataacgatcagcgactggtactccaatgcggcataccatgtcgagcagttcaagacatccgatggcaaggtgctgcgcgataaccaagtgaatgcgctggtctcagcgatggccggctttgcaccgccagcacttggtcaaacgtcgttgtctaccgattatcagaaggcattgaatccgctgattgccgcgcactggaagtaagcaggcttgagatgaacctcgccaccccgcccagaaacgctttctggacggggtgcgggagggtgtgtagtgatgcggtgatgcggtgatgcggtgatgcggtgatgcggtgatgcggtgatgcggtgatgcggtgatgcggtgaacaccatgccatcgcagatgagtacatctatgacaaggttagggctgattggatgcgatgcgtgtgcgtcttcatcaccccggagggggttgcttcacaagggaggttggcattgctctgctctgttgcgtgatgatcaaccgtttgcaacgaggtgttacacggccatgtggggcacagataatgcgaaggaaataatagccgtatgaggggcgttctttgctgcgtggctgtcatgacgcagtatcaggggaagccaacgccacaagtcatcatatgagtgttgctgtgctgcgctagaagtgttgcgggtgatctttgatcttcagtgacgccgatgtctcagctattgagcaaacaatggtgatcgcaccggcaactttcagatcgcttctaggccttctaggcagcgtgcaatctatgttcttggctttgcaaaagtggttagccctgctggatggctgggggtcaagcacgcagtgcgctccccccaccaccataacaactcagtcgcgcgactgaattttagacagcaaacgcaagcactccaggtacaaccacaccaacgtgaccatcaggccgaatgcgccataccattccatgtactttggtgctccttgctcaacgccatgctcaatgaggtcaaaatccaacaccaggttcaatgcggcaatcacaaccacgaacaggctgaagacgatgccgaaagtacctccttcatgaatcattggtatgtgtattccaaagaagcttaatgcgaaggagatcagatagagtaaagcgataccgcctgtggcggccatgacaccgagcttgaaattctctgtagccttaatcaagccactacgataggcaagcaacattgccattaatgtaccgaaggtcagtagcacggcctggaacacaattccaccaaattttgcctcatacactgccgagactgcaccgaggaaaaagccctctacgagtgcgtacattggtgcggtgattggtgaccactcttttttgaaagcagtgatcagcgccagtattaaaccgccgatcgctccaccaatcatatagccacgcgccgctaacaggggtacgccatcgaccccaagcgactgattccaagcgaagacggaggtaaccagcgctaacagcagcagggccccagtcttgttgactgtaccgtttaaagtcattgcgtttccgtcacggacgacaaccgagccggtacccagatcaaggaacgtggactccttaagagcaggatttccgctacgcataatttgttctccttaataaagtctctaatatgcccccaccgctatggtgacgacgtatgggtaagcataacggatacactgaacacagtgggcatattaattgacagcgaacgagccacttcatgataatgggcgggctcttaagccatcttttggtcaactcaagggtaatttatcggggtatagcgcagtctggcagcgcgcctgctttgggagcaggatgtcgggggttcgaatccctctaccccgaccatgatgcttcactcaatgtatggttgtttatacatagtggggtggcaggggagcagtcccaggcgcccgtagctcaatcggaataagagcaccggccttctaagccgggggttgcaggttcgagtcctgtcgggtgcgccatatcagcgtaaacgggtcaggtagacggcagtttcaatggtggctgtagctcagttggttagagtactggattgtgattccagttgtcgggggttcgagtcccctcagccaccccaataaacgcattaaaccgaaatatcctctttcgcgtgatgcattcccctgctgttgcataagcaagaaagtatattattatttcagtttatagtagcttgatcgtttgttcgggccgttagctcagttggtagagcagttgactcttaatcaataggtccaaggttcgaatccttgacggcccaccaaacaaatcaataagttacagaaatgcaagcggtgtttatttatagcggcggtaaagctatcgggaaaacttctggtttctttggagcctccacgataggtgtttcatgatcgtcgcgctcgcgcatcgcttcagtgcggtgccctccggaacgcttatcctcactatcggtgatccctcagggcttgaggccgtgcagggagaagcgttcttcttctgtgataacaccttccctgatggccataacaatcttttctccggttgggcaggataccttccgctttgtgatgggcctcgatgagggtgcatacctcaatgcctcgtaggcgcaagtcgtaagcgaatgtcatagcggcggccaaaacacagcatatggtttgccttggatggtgccggctgaatcgcttcacagtctccttgtgcagggcgtccttgcgcgatgccttcaactaaacgctgccacgtgggcacattgagcttgttaacggctgtacttcctaatgctgcaaaccctgcgcctaagtcgtgaggcgttaaacggcgtcttccaagaggcacaggatctaggcgtcatcaccgctgatggcgccgataccgcgctggagtatggcgatgcaatggaacgcctgcgcgtggtgctgggcgcgttacggaccaacatcgcgattggggtggcaccggccttcacccgcctgattgagcactccaaacactggttgattgccaataaagcgcaactgcgtgatggcatcggcaaagtagtccacatcctcattgcagcgggcactgccgtatggaacttcatccgtgcggtgaacagcgcggtgaatcagaccattggttggaaagcggcgctgctggccgtgggcgcggtgctggcccgggcctttgcactgaacccgctcacctggctcatcgccgggatcgtggccctggtggcgttggtcgatgacttcatgacctacctggacggcggagagtccttgctcggtgccttctggggtccgctgatcatctacgccaagcgtgccaaggcggtgatggcagacctcacgcccgcactcaaagccgttggcgtcctcttggcgggactgggcatcggtcacgtggtgagcaacatcggccgcctcgtgggtgcaggccgcactctggcgctgtggctggcggggccgttggtgaaagcaatccaggttgccgcgctggcgttgcgtaccgccttcctctccaaccccattgggctgctgattggaagcgtggccttgctggcgtatgcgatctatacgcattttgacaagatcaagcaggcagtggggacggcctgggactggtgcacccgcaccgccaatgccgcgtttgggtccatccaacacacgctgcaagaggttgccgccgccgccaagaccacctgggccagcgtcaaggacgcctgtgcgctggcctttagccacagcatcgccgccgccgatcacgccgtaaaccgcgtgcaggccgtgttcagcgccatgggcacccgtatcagcgccgccctgagcagcgctttcaacaccctcatgaggctatgggatcgcaccgtcgggcgtatcgcccagggggccgagcggatcaaaggcttgttccgagcgattgctccaacactgaagcaagccggtcgtgacacccaagacgtggcgcagcgcgtcaatgcacaggtgcaggccgcccagacgacaggccgccacgccgctgctcaggccgccacgcccgcccgttcccaggccaacgtccattcccaacaggatgtcaagatcgatatccacaccgccgacccgatcctggccggtcgccaagccgccgccgacatcaacagacaccaccagatggcactgcgcaataccggcagtgctgtggcgttttgagggaatcgtcttacctctctagccagtctgtctaaaggcaggatcaggagcgcaaagaatcggtgtcaacgcattggttgcgctactagacgtataccgagggcggtacagacgcggcttatcgtatcgaagcgtggttcactgccaggccgaagggccttgtatagaccttcccgcgtgatgccggaatccttcgcaatctgagacatgccacgtgaacgggcaatgtcacccagcgcagccgctaacagtgctggatcgttttcttcaagaacagccgtgagatacgcggctacctcctcctcgctgctcaggtattcggcggcatcgaactctggcagttcggagacattgattttcttggtgatggtcacgggtcaatcctccaaagattttgctagctcaatggcccgacgaatgtctgattgttgcgttgacttgtcgccgccaccgagcatcacgatgagaaagctgcctcgctgcacgtagtacatacgccagccaggtccgaagtgttcgcgcatctcaaacacgccttcacccaccggctgcacgtctccaaagttgccgagctgcaccttgcgtaagcgcttgatgaggcgctgccttgccagcccatccttcaggccctttagccagtcagagaactcttcgagtcgtttcaccgtgtagatcatgcactgtactgtaatcaaacgattactttgcagtaaagtcaaacgaaaatagtaatgctgtaccgtaatccatctatcccctcatgatcaccctgacccaccgccacatcggcaccgtcaccctggatgcggtgatggaagaaacgcaccacgccgagctgcgcatcactgagaaccccgtagagtctggcgcgatgattggcgatcacgccgtcctgatgccgcaaaccgtcaccatcgctggcattgtggtggactaccaacctcagcgcagcccagcccctgccgcagaggagcacggggccgagccatggcgtgtcctgaccgatcgcgtgcctttccccacggacctgctgcccttcaccgctcaggccctgcgtgtggcccaacgtgagctgccatcggtgatccgccacgccactgcaccgcagagcgacggccagcacgccgtgcgccctttggccgactggcttcctgatgaccagcccatcacttctggtgatgacgctgccaccacaggccgcattgcccaggtgtacaccgccctacggaatctacaacgcagcggccagaccctggaggtacacaccggcgtccagacgtatcaagacatgttgcttctctccattgcggccagacaaacccaggatggttcgattgaatgcgtgctgaccgtgcgagaactgttcatcgtcaagacaacatcgatttctggtgtgtcattgcccgcccccaaacgcggtagagcctccgcccaaggcgcggcgcaacgccacagcggccagacccaccctaagcaggccgacaccgagaaaaaccgctccctgctgcgtcagatgtctggactgttctgatgcgacagattcccgtggatagcagcccctaccaaacccaatcctttcagatggccggggacgccttacgcttgattctgcgctggaatccggtgccctgctgctggtcgatggacctgtacaccgcgaccctagatcagcccgtggctcatggccacccagtggccaatggcggtggcgccttgttgttggacgtagttgacgatcatatttttggcaaggtcgctgctggcagcgctgacgttgccgctggcaccggcggctaaggcggtggtgatttggcggtaggtgccgccgggtccccaggcgtctttgagggcgtgggcttcgttggtgagggcgatggcttggtcacgtaatgcttggcgctgttggtcattgaatccgttgctggggtcgtgggcggcgtggtctgcggcggtggcttggcgggttttgagatcggcttctgcggcgcggttgttgataaaagtaccggtttcgcgttgtaggccgctgacgatgtcaaagccggcgttgagtggtaggcaccacttttatttaaatattactgatcaaacagagtttatttaacgtaactgcgtttgaataaaagacgatgatttttggtaatgaataccgacacagataccgccccatgagggtcacggcatctgtggatttaaataaatcatcgcaatagggaatgaaatgaatgacgcatcatgcaacgcatcaacacacctcatgtccactcgtaataatcctcaccattttccccctcccctttaaatacccatactgcaagaaatggacacgcattttttagaacaaaccaaagccctggcgctccctcaatatctatctgttcatcggaagcagggaaagagcttctgaacatctctaccagttcctcggtagtgccattgataaattcgccttttgtgttacaaattttgagccgttcatcatccagtagtttccctactaaaaaaaagaaatcattctttctttcttcaaatgaatccggatccacttccccatcgggaattgcatgtgcatttcctatatcactccaaagaaaatgaacccccccctaaattttcataaatatcatctatcttctgttgcgttaacataaaatcacctatcacctaaatttaatttcaatttttttatttccagctttacttaaagaaggattatttcttatatcaattgtccatcttgctttagtttcattatttgaagaagaaacagacctcaatgtcaccttggttccatcgctcaatttagccacataaacgccttcctttacctcttttaaaggcacatccccagccaattgctgtgcatactctctgattttctgatcgctgaacgcttctgattcaagcaccttcacattacccgctttattactccccccgacagagccaggcggtgtgactttggcttttaaaccagaaaaaacaaattcgctacttgggttacttttatcaaaaaatctattgctttattacatgaaataataaattaattatttgcaagggtagtttatttaatgcgaatgcgttgctatgtggtagtaataccgatacagatgccgccccttaaaggcacggcatccgcgtaatctaaataaacaaccacagcagggagtgaggtcaacgcattatcaatccgcccactcgtaataatcctcaccatcttttccttctcctttatgcacccagactgctataaatggacattcttctgtcactaaccaagttcctttcattagctcttcatccgaagcaggaaaagagcttctgaacatttccaccaactcctcagtggtgccattgataaactcgccctttctattaccaagcttaagccgtccctcatccagtaatttacctattaaaaatagaaaatctttctttctttcttcaaatgaggccggatccggtcgctgaggatgtattccatgcgcatctcctatataaccccaaagaaaactcaaaggcccacctaacatctcataaatatgatctatctgctcttgcgttaacatgtcatcacctctcacctaaatttaaattcaactctttgatctgtaacttctctcaatttaggattattttctatatcaatcgtccacctggctttagtcgcattatttgaagacgaaaccgacctgaaatgcacaatcgtgccatcactcgcatcagctctataaaccccttcactcattctcttaaaaggcgcaccttgtgcccatgtctccgcatactgtctgatttctttatcggttagcatttctgatggaaatactttcacattgcccgctttattacttcctcctggaacgttagggtcatacggcaggggttccagctgcttccctgaaataataaattgattattttggtgacgcttatcaaacgcattttattttaatgcaactgtgtttgaataaaatgttatgtggtagtaacacaaacgcgggtgcagctcgcttcgaaacatggcacccgtatatctaaataaatcacagcaacaaggaatgaagtcaattaagcatcatcaaaaacaccaatcgtaataatcctcaccattttctcctgctcctttatgtacccataccaccacaaatggacattcctctataactaaccaaattccttctattaactcctcatcagaagcaggaaaacagcttctaaacatctccaccaattccgcagtgttaccttccataataagctcggtctttctgttaccaagcttaagccgcccgtcatccattaatttccccaatacaaaaaagaaatcattttttctttcttcaaatgaatcatgatccacttgaccagtagaaagtccatgggcatcccgtatataaccccaaagaaaatgcaaaggctcaccctcacaaaaaaaatctgggtcttgagtcaacatgtcttgagtcaacataaatttttcatcacctgaatttaatttcaattcttttatttgtaatttccctcaaagaaggattattttctatatcaatcgtccacctcgctttagtctcattacttgaagacgaaaccgacctcaaatgcacaatagtcccatcactcagatcagccctataaactccttttctgctcgtctcctttaaaggcacatctcccgccaattgctgtgcatactctctgattttctgatcgctgaatgcttctgattcaagcaccttcacattacccgctttattactccctccgacagagtcgcgcggtgtgactttggcttttaaaccagaaaaaacaaattcgctacttgagttacttttatcaactaaggctagtgctttattaaatgccccctgctgctgcaccaccagtttttcaaggttcctggccgccatccgctccaagacatcttcactgacgttgatgcctgccttggccagcgctcctcctgctttggccacaccccccacaccaatagccacagaaccaatattccagaacagggcacctagatcacggccgtattgcacggcatgttcatcacctccaaccatcagcgccgtctgcatgcgatcaatcttgttatccagctcctgaaaaacactgtcgcccaattgttgacgcacttcaggattgacaatcagttctttcagtcctttaagacccgcaatagggtcagaaagaaattccagcatccccttgatatcgttgatgcctgcttcccccaagccattcattaacccaaccgtcgttaatccctcttgttttatataaatgccccccccacttgccgatcactttcagcatttccaagttgttcttggcatcactgatgtctttcttcatctgaatcacttgctgggtggctaaccagttgttatccacggcagcgatagcggcatgggtggcggtggccgcatcggtgttgccgatgctggcgatgccggtgacgatggaggtaatgaggttgcgtttggcttcgcggtcttgggcggtgtcttcggggcgggggtcgctaaataatccggtgaggacgctggaggcggcggcgccttgggcgccactgctgcagctttgttggctggcggcggcaccagcacaggccagcagggcatggagggcggcgtgtaaggggctgccttcggtcagttggccggtggcgacccagtggccaatggcggtggcgccttgttgttggacgtagttgacgatcatatttttggcaaggtcgctgctggcagcgctgacgttgccgctggcgccggcggctaaggcggtggtgatttgacggtaggtgccgcccggtccccaggcgtctgtgagggcgtgggcttcgttggtgagggcgatggcttggtcacgtaatgcttggcgctgttgatcattgaatccgttggtggggtcgcgtgcggcgtggtttgcggcgaagtttatttaacgcaactgcgtttgaataaactacgatgattggtggtaatagatttaaatagatttgcagtaataccgatgcagataccgccccatgaggggcacggcatctgtggatttaaataaatcatcgcaagagggagtgaggttagtcacgcatcatcaataacaccacccgtaataatcctcaccattttctccttcaaacaaccatacagctacaaatggacagtcttccgtaactaaccaaagcccttctagcatttcttcatccgaagcaggaaaagattttctgaacatttccaccaattcagccgtggtgccgtcaatgataagttcagtctttctattaccaagcttgagcttgccctcgtcgagcaatttctccactaaaaataggaaatctttctttctttccacaaatgaggccggatcagcttctccagaagaaactccatgagcatcccctatatcaaaccaaagaaaatgaaatggatgctctaaatcctcataaataccatctatctgctcttgcgttaacatttaatcacctaaatttaagctcaacttttttatttccagcttccataaaagaaggattattcctgatatcaatcgtccatcttgcttgagtcacgtcattcgatttagaaaccgacctcaaattcactatagttccatcactcaatttagccgcataaacgccgtcctttaccttctctaaaggcacacctccagttaattgctgtgcatagtccctgatctgcgcatcggttaacgcctgcgagtcaaataccttggttgtaccacttttattacttccccctacggaaccacggggtgtggctttgacttctacccctgcaatcaccaactcatttcttaggttatttttatccaccaaagcggctacttcatccaggcgcttttgctgctgcagcgccatgatttgaccaggcggtttttgggttacatccgggccgttggggtgattgcctatccgcgtcagtgcttcttgttctgcgctgacaatgttatccacgttggagagctgattggctttggaagtagcgatcccctccaaaacatctttactgagactgatgcctgcctcaccgaggatctctgccgctttggcggtgccggccgcagccaatgcaaagccgacatccgcgatcactgagccgagatcttcgcccaactgctgggcatgttgatcgcctccaacaaggagagcctccgacatgcgagaaaccttgttaagcagttcttgaacggcgctctcacctaattgcagcaggagtgttgggtgggtaagaattttccccaactcatgaacggtatccaccggatgcaggaacaagtgctccagcccgttgatatcgttgatgcctgactcctttaagccttttaagagtccatcaacagtgagtttatcttggcgggcatcaatctcacgccacttcgctcttactttctcctcttccaagcggcctttctctttctccgtagcggcctcaaactcctcgtttagcatttgaacgtattgcttggccgccaaccagttgttatccacggcagcgatggcggcatgggtggcggtggccggatcggtgtggccgatgctggcgatgccggtaacgatggaggtaatgaggttgcgtttggcttcgcggtcttgggcggtgtcttcggggcgggggtcgctaaataatccggtgaggacgctggaggcggcggcgccttgggcgccactgctgcagtgttgttggctggccgcagcgccggcacaggccagcagggcatggagggcggcgtgtagggggctgccttcggtgagttggccggtggcgacccagtggccaatggcggtggcgccttgttgttggacgtagttgacgatcatgtgtttagcaaggtcgctgctggcagcgctgacgttgccgctggcaccggcggctaaggcggtggtgatttggcggtaggtgccgcccggtccccaggcgtctttgagggcgtgggcttcgttggtgagggcgatggcttggtcacgtaatgtttggcgctgttggtcattgaatccgttgctggggtcgtgggcagcgtggtctgcggcggtggcttggcgggttttgagatcggcttctgcagcgcggttgttgatgaaggtgccggtttcgcgttgtaggccgctgacgatgtcaaagccggcgttgatgcgttgttcgtcaaagatgggtgtgagggcgttgctggtggcggtgtcggtgaggaggtcgcggttgagggtggcgatagtctcggcggcggtgtggccggtgagggcgtgttgggcggtgtcgtcacggatggtgagggcgccttggctgatgccgctgtaggtggtgctgtggctgctgtcacgggcggtcatggcgctcgggggggaggcgctgaggccgttgtggctgggtaaggtggtgccggggacctgggtggcggtggcggcgtggccttgttggtcggtgccgacggtgccgccgttgcggctatagccgccgcccaggttgacttgggtggcggtgtagttggcgtggttttcaatgttctgcaggatcagggtgccggtgtccagggagttcaggccgttgtggatggcggtgctgttggaggtgatggcgccgccaatgaggtgggtctggccgccgacggtgagttggtagccgccatcgccagtaaagaggccgctttgttcggtgacgctggcgtagtcgctgcggatggtttggtggttgaggttggcgctgccgctgaagcctgcgccagcggtgaggctgccgccgaggctgcggtctgtgctgcggtactggtgggtgtcttggaggctttcgatgcggaggttgccggcaatgtcggcaatgacgtgtttggcggtgccaatggcgcctttcatgaggaggtcgccgcccgcgtcaatggccagtaggttgccgcctccgacgtggctgttgctccaggtgaggtcggtagagtggccgctgcctgtggaggtgctggcgtgggcggtgaggccggcgctggtgccgccgctgcccaggttcacggccacgccgacacctgcgctgcggcctcggttgtcgcgttggttggtgacggtgttttgggcagccagcagggcgatgtcgccatcggctttgaggtaagtcatggtgtcgccgcggacgtcgctgccttggatggtgagggtggaggcggtgccgtcgccggtggcgctgatgtggacgttaccgccggcggtgacgttggaaccggcagcggtgctggtggtggtggtggtggtgctgtcgtgtgtgctacggccgacggtgagggaggcgttgaggccgcccagggcgcgggggtcttggcggacggcgtcaatggtgtttttggcgcctagggcggtggtgaggccggcgagtgcctggaggcgagggtcgccgctgcgagcggcggcgtgttgcatttgctgggcggtctgggcaccggcaatcaggggggtgctgagagccacggtgaggccgctttggcgggtggcggtgtgttgggtggtctggctggtgtggtgcgcttggatgatgtcgacttttttggcgtggatgtcgatgtcgccgtgaggggacaggacgtcgctgccgatctgttggtagtggccgcccgccaggagggtgacgttgccgttggtggcgccaatcagggagccggtggtggtggtggctgtggtggtgctgtcggtgcgttggctttggttgcccagggtgagggaggcgccgccgttgcggatgaggccgcgttgtttggtgtggtgtgagtaggtggattgggtggtgtgggtggcggcttggagggtgaggtcgtgttcggcctgcatgtaggtgccggcatcggagacgacgtggctgccggtgacggtgatgttgttgcctttgacgaagactttatcggcgctgagggtgctgccaatggcctgggtctgttgttggtcggcgtgggtggtggtggtgcggctgttgaggaggccgctgcgtttggtgtggctgtcttggctggtgtattggatggtgtcgccgtgcgtaatggtgacgttgccggtggccagggcggtgatggtgccttgggtgctgtggagggtggcggcacgcaggttgatgtcttggccgctgttgagttggatgtcgccgttgccggtgatgctggtgccgtattcggtgtcgatgcggctgtggcggctgttgcgggggtcccactgggtggtgtcgctgcggtgggtggtgagggtgcccaggtgtagggggccggtggcgttgagggaggtgtagccgtccgtgccggtgttgttgatggcaacgccgttgtgggtcatggcttggtcggtgcttaagcccaggtaagcgccggggccggtgacggtgaagccggcctgttggtccagttccgtcacgctgtggtggcgggtgccttgggtggtggcgtcgcgcagggtgctgctagcaaggaagttgccttgggcatggactttgaggtagccgcgggctttgaattgtccgccgagggtggtgaagtcgccggtggtgtggatgtggatggcgtcggcggtgaggcggccgccttgttggtccatggtgtgggcgttgatgtcgatgaggtggcgggcgtcaatggtgccggtgttggtgaaggtgtgggcgttgatggtggtgctggcggccgccaggagggcgccgtctggggtgaggtcgccggtgcgggggcgcaggtagaggcgggggacgagggcgcgggtggtggtgccgtcgggcagttggacgtcttgttggacgagccagacgatatcgctggtgagttgggcgagttggtcggcactgagggcaatgccggggcgcagttggtgctgtttggcgacggtgacgccggcgtccaggagggcgcggtattgctggtcgtcgtcggtgtagccgtccaggcggcggcggccggtgagttgggcaagttgttcgcggatgaggcgttgttcgtagtagccgtcgccgaggcgtttgtggagggtgtcgtggtcgccgagggcgtggagttgggtgtcggcgctggtgtaggggcggccgagggtaaagcgggggtcggtggtgatgagggtggcggcgtcggggtgaagggtgaagaggctgttgttgggcagggtgagggggccggtgggggtgacggtgacggcggggggggcggcggggtcgcggatgggggcgttgggggtggtgatgctctggtcagggatgtaggtgagttcttggccggcgctggggccgttgtcggcaagggagacggtgtggaggctgggggaggtgtcggtgacggtgatgacgccgttgacgacactcaaggtttgggtgctggggttgtaggtgagatgttggatcggctcgggggcgtgggtggagtcggtgacgttgttgagtgtttgggcggcaatgtgttggtggccgccgctggtgatgcggccgccaatctgtgtggtgggggtggtgcgggattcattgctccatggttcggagactttgccacggtaggtggtgctgatgttgtggaaggtgtcggtgcgggagagttggagggcgcggttgtcgatcagcaggactcttttgtacttgtgttcgtcatctgatttttctttcgtcggatgggggggcaggccaacgatggtttggtcgccgccggcgaggaggtcggcgtagtggttacgcagggtgtcggtctgaatcatcatggcgccgccggtctggatgagggcgggggcgccggcatcggggttgagaatgtcttgttgggtggttctggtggcatcgcggtatttctcgttgtcgcggacatcgttggggccgcggtgcatgtcaatgagggtgtggtctgggtcggtgtagtcgtgccaggtgacgaggcggacgcagtcgtcggtgcaggtgccgtagttggagtcgtaggtgaggcggtcatcgccaggggcgtaggtgatggggacggtttggaagcgttcgttttgctggggggtgtccaggccgatgaaggcgctgtggttggtcgcggcggcggcaacgtggtcggggttgggttgtttgtcctgacggtcggtgtagtagaggacgacgctgtcgccggtgcgggcggtgaggtccatgcggcggcgttcggcttggctggcatagaggccgccacgggcatagaagtaggcgctggtctggggggtgaggcggacgatggcgcggtggatctgttggccatcgggggtgatgtaggggtcgtctttgatgatgtcggcggggttgaggtaatagatgtcgtgggcgtcgtagttgctggtgaatcggaagttgcctgagccgccgttgggttggtttttgcgccagtggggttgttccatgcgggcttcggtcacgacgtcgggggcgtgggcgatgtggacgttgtcgcggatgttgttgagggtggtggtggtgatgttcagggtgccggtgatgtcgatggtggcgctgcggttgtccaggagggtggcggtgccggtggcgtggagggcgttgtccagggtggcgccgatggcggcatctccatcactgagaatcatggcgttggcggtgttacgcagggtgtcagcaccaatgtctaggcgttggcgggcggcgatggtggcggcgtgggtgtggccgtcgctggtttcatcgcggttggtaagggtctgggcgtggagggcaatgtggtcgccgtagaggcggccggtgccaaggttgtcaatggtgggggcgctgaggtgggtggtgaaggcgtcgatgaggccgcggttggtgagggtggcggtggcggtgagttgggcgagggtgttggcgatgagttggccggtggcggtgttggtgatgtcacgggcgtggacggtgaggtcaccggcgtgcacgaggccgctgttggtgagggtgtcggtagcggtgagctgggcgtggccggtggtgaggagttggccggtggcggtgttggtaatggtgttggcttgggcggtcaggtcaggggcttggagcaagccgctgttggtcagggtgtcggcggcggtgagggtggcgtggctggtagccaggaaggtgccggtggtggtgatggtgttggcctgggcggtgaggtcggcggcttggaggtggccgcggttggtcagggtgccggtggcggtgaggtgggtgtggccggtggccaggagttggccggtggcggtggtggtgatgtcacgggcctgggcggtgaggtcggcagcttggagcaggccgctgttggtcaaggtgccggtggcggtgaggtgggtgtggccggtggccaggagttggccggtggcggtggtggtgatgtcacgggcttgggcggtgaggtcggcggcgtggaggaggccgcggttggtgatgtcgccggcggtggtgagggtgagtaggccggtggcgctgaggatgccggcggtgtcgaggctgtcttggagggtcagggtgagggcgttgccggcatggaggcggccgtcgccggtgaggcggtggagggtcagtgtttgggtggcgccgctgaggagggtgccggtgtggttgctgaggtaggcggcagtgaggtcgagggtgccgccggcgctgagggtgccggcggtgttggtgagggtgtcgctcagggtgagggtgaggttttgagcggcgctgaggtgggcggcggtgttgtccagggtggtgctggcgatctggatgtgggtggcgtagaggccgttgtctgtgggggcggtggtgtcgctgggggtgtcacgggtcgccgcaacggggggtgcggtcatgggggtgctgtggttgtccagggtggtggtggcgatgtcgagggtgccggcggcggtgatgcggccgtcgtggttgttcagggtgtcttggaggtggaggcgggtgtcgccgccgctgtagaggcggccgccggtgttggtgagggtggtgccgtcaatctggagggtgccgctgctgctgatgtgtccggcggtggtgttgtcgagggtggtggtgtggaggtgggtggcggtctgggagtcgatggtgccgccgcggttgtcgagggtggcggtggtgaggtcgagggcggtggcagccaggagggcgccgccgtcgcggttggtgagggtggcggcgccggtgtcgatggtgagggcggcggcggtttggaggaggccggcggtgttgtcgagggggccgctgtggagggtgaggttgccggtggtggtgccgaggcggccgcgggtgttgtccagggtgtgaccttgggtgtccagggtgagctgagaagccgtcaaggtgccgctgcggttggtgaggccggcgctggtgagccagagggtgtgggcggtttggaggaggccggcggtgttgtccagcaggccggtgagggtgaggtgggccggtccggcggcatccagggtgccgtgttggttcaggaggctggcggcggtcagggtgagggcgtcggtggtggtgagcaggccgttgtcttggttgttgagggtgccggtgatgcgcaggtccagggggccggtggcggtgtggaggatgccgccgcggttgtccagggtggtggcgtggagggtggcggggccggtgatctggaggtggccgcccgtgttggtccaggtgccggtggtgagggtggtggggccgttgagcaggaggtggccggcggtgttggtgagggtgtcggtgatgtccaggcggttggggccggtggcggtgctgtggagggtgccgccggtgttatccagggcggcggtgtgcaggtccagggtgccgttggtggcaatggtgccgccggtgttgtcgaggcgggtacgggcctccagttggagggtgtgtgttccgtaggcggtgaggtggccgccggcggtggtgaggtcccctgtgtggagggtgatctgttgggcggtggtggtggcgtggctgaggtcggtgtgggtgccagtgagggtgagggtgtcttggctggtcagggtgccgcggtgggcggtgagggtggcggcatccatgtgcaggggcccctgcccgctttggacggtgccgtcggtggtgtcgagggtggcggcggtgagggtcagggaaccggcgctggcgagggtgccgctggtgttgtcgagaaggtcggcaatggtgagggtggcgctctgggggccggtggtgaggaggtggccgctggcgttgttgaggtgttgggcggtgaggtccagggtgccgttgacgtggagttggccggcggcgttgttgagggtgtgggtgtgaatggtggcctcggtggcgagggtgaggatgccgtgttggttatccaggcgttggccttggagggtgaggcggttgagggcggcggtgccgtcgcggttgtctagggtggtgaggatggcgtcgatggcaccgccggcggtgatgtggccgccgcggttgtcaatgtcgttttctagggtgaggcgaccggcagccagcacaggcgctgtctggggatgggaggggatgggcatcgtgccggtgctgggaggtgtgtcggtagcgggagggacgctggcaacgggggtcgggtccgctggggaggcttggccggatgccggggtctccaaagcgccgaggcggccttgggcctggttgtccaggtgttgggtctggagggtcaggggttggaggccggtttgttggatgtggccgccccggttatccaggcgggcgccggtgatgtccaggcgggcggcggtgagggtgccgctgcggttgtcaatggtggtgggggtgtgcaggctcagggtctgggcggcgctgataaggccgctgttgttcactgctgcggtggcggtgagttgagtgtcggtggcggattggaggcggccggtgttctctagaagaccatccacggtgacggtgaggggggcgctggtggcgctaagttggccggcgttgcggacgcccaggccgtgttcggtgccaatcagggtgattttgccggcatacatgccgcccagggcggagacgtccagggccacggtggggcggtcgcctggggctgtaggcagggaggcggtggggtgtccgtccagggtgacggtggcagggccggtggtggcctgaagtttttgggcccagaggccggcgttgagttggacggtgcgggcaatcagggcggtgtagtcggcgctgcggctgtccaggcccaggccgtcgagttgaatggcgccgccgtggacgcggtagtggtctagggcaccgcgggcgttaaagacgggggtgcccgtggtgagggtgaactggctggcattgatgacgccgcagccgttgcaggtgatgccggaggggttggcaatgatgagttgggcgcggtcgccagccacttccagatagccatgcagttggctgggtgtccggctgttgacttcgttgaggatgattttggcggtgccggtggccagccaggggttgccttggacggtgcccgccaggtgggtctgggccggggtgcgggcgttgttgaggatggcgccttgtggggtgatgtcaaattgttggtaggtgttgcgggagacgcccgcctggctgggggtctggatgtggatgaggggggtgccgttgggggtggcaaggacggtcgggcgttgttggcctggggcgtgggggtcggcgatgacttgggcggtggcaatgcccgcaatgctcacccagccgaggctgagccacagggcaaaggggatgggatggaggcaggcacgcgctggccgttgtgctgcaagggaaggacctggggtaccgccgggggcggtggctcgttctgaggccacttgccacaaacgcagggcacggttgtagatgaggcggtacaggtccttgttcatgaggtttcctttaggtgaggggcatcccgaatcgcttggtgtggggggatgctgtgttaatgggtgatttttttcacattttatcaggggcggtaggggaagaaggtgaagacggaagggaggaatgtgccggatgtggatgtcagaaaaatctgaaagacggacagaatcgggggaatggggggaatttggggggggcaggccgtggcaccgtctccatctttaggaggctgtgtggtggtttttttgtgcgatttgggatggtcaatcttttttcagtaggttgctggtgttctgcttgggatgggtgattgtcttggtatctggtttgatcctttttttggggcggcagtcgtatggagagtgggggtgtctgatctagttgtgccggtgatgggatcggtggtcacgtagcagggtgtgcctctttgggggttgatcgccgggatagggggttggggggcggtttgaatgtttggggcaggacgatgtattgcattgctggatcggtatgagggtaaaagtcggctcggtttggaatgtattggtgtaaagcgaaggtgttaccggtggtatttggctgaggcattggggggggtgtttgacatgctgacggatgccgtcagggatcagatcggggaatcggggaggttcggtgacgatgtggggcaggtattcaagcgctgctgcacggcggtattgccaccaccaatgccgctggggtgggtctgtggtgtgtctaggatgtgtatgcctgagcgcgtaatagtaaagcgtaaagcccgcattaaagcgggctttatagggtttttctggtttgttgggatgtctaaaaaatagtgtttattttccaatacagaagtttgagaaaatccggccgagtaattcatcggggctcatgctgccattgatttcccccagtgctttataagccaaacgaagttcttcagctgtcaattccaaatgttcataggcgaattgtgcgttagcatcggttacatgggccgcagtacgttgtaaggcttgtacatgacgtaatcgtgccgaaaattcaccttcgattgtttcgactgtctcgccaagcagcaatgtgcgcaagcgggttttcaatgtctccaagccagcaccagtcattgcagacactgggatcacatctgtatccaatgcggacggtggctcggtaagtaaatcaagtttgttatgaatccagaggacgcgtggcactgaagtaagagcatctgcaagggcaaggctgccaatctggggatcgcaggcatctaacacgaccaatgctaaatcagcgcgttgtaattcattgagggtacgacgcatgccttcacgctcaattgcatcgccttcttcacgtaagccagcagtgtcaactaaaacaaattccaagccatggaaatgtacgctctctcgtaatgtgtcacgcgtggtaccaggaacatcggtgacgatcgcacggtcactaccaatcaaggcattgagtagtgagcttttaccaacattcggaggaccaactaaaacggtatacagtccatcgcaaaggcgcttgccatgctcagcgtctcgaagcaattgggtcaattcaacattcaaggtctgtaaagaagtacgtatctgggcacggtctagggtatctaatgattcttcggcaaagtcgattgttgcctcaacgtgaatacgtaatctgattaattgttgggctaatgcttcgcaacgccgggaaaacacgccatccaacgatctacgagcagcacgggcagcacgcaggtcagcggcgccgatcatatcggcaattgcttcggcttgtatcaaatcgagtttgccgttgagaaaggcacgttcgctaaattcaccagggtgtgcttggcgcgctcccaaatccagacagcgtgtaagtagttggcgtagcaacagtgggctaccgtggccttgcagttctagtacatcttcgccagtgaaactatgcggagcaggaaaccatagtgctaatccgtcatcaatgacttcgtcttggacatcaagaaaacgggtgtaatgcgcatatcgtgggcgtaaggtggtcattcctagaccagttgcaattgtcttaatcagtgagccagaaagacgaatgatccctattccagcagcaccagaggcagtcgcaatggcagcgatggtgtcgcccatcttggttgagcgctggctcataatttagtcagtttcatacccagctgctttgtaccagaatcttctggttgaagatccacgtcagttgtatacgtttttcgcgctttatctttattatttaactgtaaatagatatcaccacgattgagttgtgtggtcgcaggtgagtgatctatttttagggtgttctgcaaccacggcagatgttgtgcatattcgctctgaggaggataaaagaaaccaagatttttagacgtccgtaaaaagtggggatttagttccagtgtgtcagagaattgatcggtaagttccttagtgctcttgtctttgtataattgcaacccaagatcattcgcaggctgggctagctttcctttgcccaacttaaccgctggaggtaataataaccttgcttcatcatggtgtagattttttactgtgattaatttaacggcagtcgtattttgatgtagctgtttagcttggcgtgtagtatttgtggactcaagagggccattcaagttaatcgcctttactggtctctttgtgttctgtgttgtcagaatttctttacgcctgggtatctcgaacacaaattctccgccctgtgaaccaagcaaaggaccgaatgctggggtttgtgctgataccgttgatacggctgatgcaacgtatgatgccaattcagtaccagtgatcaatccgtcatcattaaagtcagcacgcccagacaaggcttgcaacaacgcccaggtgaagactgaatggccgtttgggcccttatcggtcactggttgatcaggcccaccagaagtgagcatttgacgactcattcggttaatgctcgtagcaaggcgaggactggtctgtgtctctttaggcattaaacccaaagcgctatagcaagcatccatcacaagcagcacatgcttagcttcaaaggtcttagcgatgttttgtaccttggtcattgaaatcgcatcatctgcaaaatgcgccggatccgagtcaacaggaatgatgtaacccacgtcgcgtcttaatgagagttggcgtgtggcgccatgaccagcaaagaagacgaataggcgatcatttttttgtatacggccattcgccaagtcgttaaaaacagaaagaattttatcgcgagtagcctcacggttcttcaatagaatgacgtgtgaagatggaaagccaaaggattgaattaatgtgttagcaattgcctgcgcgtcgttagctgcgtatttcaatttcggccacttggtgtagtcatccacaccaatcactgttgcccaagaacgtgaagctgtcgtttctatcccttcaccatcggttttggcacttttaggatgggtattattcacgctaaaagcatgaccatcccaaccagcaaattggtagccttcagcgataagtttctccaaaatctgcggtaatgctttcactgcgcggtcatggatatcgtgaaacaaaatgatgccacgttgcctttgggccacctggaggagtacacgccgcgcaacagaattgggaactggatcggcccagtcaagggaatcaatattccatctcactgattgaaggccgatttcagaaagcaatcgcagaccctcagcactacgcgctccgtaggggaagcggaataatggtgcacgcctttcatcaactgcgcgcaatattatatctgcattaatcacctctttgcggagcgcattgccactaagcttagataacaggtcatgggtcatactatgattagcaactgcgtatccttgctctattagctcacgggtaattttagataaaggtcctaattgcggttttccggccctatcgaatctgccaatattacgtccaacttcgaagaacactgctggcacagcatagtgctgtaagatttctttgatttcatttgtataaactcgatgcgggccatcatcgaaggtaagtactaatgttttaggaggtaattcattaccaaatatctcatgttcgctttcttccattggtatcggataagcttcgagaattccataatcatgcaaaatcattttacgtgtgtaagaacgacgcaaatgcgccacgtagtcatcccacttttcacgcttaataaagattccacgattacgatcaaaaggaatagatagccgagtaatttcctgattgtagttgcgctcaatctgatttaatgcatctatatcttcatgaatacgttgacgcaactttatcgccggaagcgccgaatcatggttaatacgggcgtcaagatcatttaacgcttcacgaaaggccaaacgatcagcgtcatagagatcaggggaggactcaatataatccagtattactgtcaaagtatcaaaacggctaggagcaccagaagcaagcagtgcatcaattcttttagaaaacgcggtgcgttgattcaatccttcattaaacagaatttggccaacttggctcgaagtaacccgctcctgaggcgactgtacctcatcatccgtgagaagcaccataatacgacggtaactctctaactgttgatgcaaagacgctagaagtggctgggcctgttgtgggtcaggggaatgtttaacgtcaactgaaacggtagtaaccggtgatgcagactcaacaggtgttgattgatgcttacaagctacaagtgccagcaatgtacacagattcagtaaaaaagaactgagcggtgtgactttattaaacatgggggattatattcttaattaagaaacaagaattttaaatatatagagaaaataatgtgtgagagataattagagaaaacgatataataattatttaatatttcctctactccttttacgtgaaaaatctgcatgttgacgaatcatccaccattggattaacaaatttaaaccaccattgatcacccaatacaatgctaaaccggagggcacaaaagccatcatcacaccaaaaatcaacggcatcacctgcatcatttttccagcgataggatccataccagctggtgtcggagtcagtttttgtgttgcccacatgattactatattgagaagcggcaagataaaataaggatcgcgcgtagtcagatcctggatccaacccagccaaggtgcttgacgcaactcaacagactcaaccaacacccaatacagcgcaaagaaaatcggcatctgaattaaaatagggaagcacccacccatgggattaattttttctttcttatatagttccatcatcgcctgctggaacttttgcctatcctcaccatagcgttccttaagctgctgcaggcgcggttgaaatttacgcattttcgctgcggatttatattgagcagcacttaaagggtacatggcaatacgaagcaagactaccaaaccgacaatagcccatccccagttatgcaaaagactgttcaggtgactcaagatccaaaataaaccttgaccaatcaatgccattaactggaagcggctatagtcaacaacacgatctaatcccttgacatgctctttagtaatttgctcaaccagcttcggacccacccacaatcgagcctctgtcgttgtactttgaccaggcgctaccgtaaaagcaggcccacgcagttcagctatatcacgtgaaccattctgagctaataaatacaacgatgcttgatctttctgcgggatccatgcagtgaaaaaatgatgttgaagcagcgcgatccaaccaccaccaatttctcgattcaggccgccatcattcatataatccttaaacgcacggcgttcataaccacctttctcactgtaccaaacagcgccgttaaaactgaacgagtctggattggtcatcgcgcggtttaagatattaggtataggtacccgactcaacttacggaaaacataagcgttccaaggggtctcgccaccgttacggatttcatctctaattaagatggcatagcgaccacgttcgaaagtaaatgttcggcggatgctgactccatttgcagctgtccaaacaaacgggaccactaaacgatcttgatcattggccaatttataggaaacacctggctgctcaggaagaaatgtactcaaattcggcactggagaattactctggcttacccaaccagtagtggcactgtaaggataatttggatcatctgtaagcaacttaattggcttagcaccccgatctttactttgaggaaaacgtaataaatcagcagcaagtacgctaaatccatctaattttagctgtaggacatcagtttttacattgatcacaggcactttcggagcaactgcaattaattgtgagtctttttgaactggaactgcgccagcattaatttgcgggactgcgtgctccaactccaaattgctatcaacaccaagattttgagaagccgagatttctagtgtttcatttttatttttaccccaatccatccacaatagggttgctaccgtcagccaggaaaatatcagtaatacacgagtctggttcatctaagaaaaaattctcgttcagtcggaacggggttctaattcgtttatttacgggaacaattacgttcgaagaaaggcagcattgcgttatcaattggagctaaaggcaatgctccgatgcgccgtaacaatgacaataaggccacactcaattcagcattactaacgtctttggcagtttgacgaacaactaccacgtagtcacctggaactaacttataggcgatctggcgcattacctcacgcagtgctcgcttgatccgattacgattaacagcgcgtatatcaactctacgggaaactactaggcccaaacgcactggacctgaagttggtagatgatgcaatcttaataaaacagacgaataacgtcgaccttgctcaaaggcgacataatattccgaacgcaaacaaatcctagcagaacgaggaaagcgcttacatgaattcaatgtacccaaatgaagacacaaaattgactttcagctacgtttaaaaggataaatttaattaagcactcaaacgcttacggcctttagcacgacggcgagctaagattttacgaccatctgcggtgctcatacgagcacgaaagccatgatcacgcttacgcttaagattactaggttgataagtacgcttggtggccatcggttctctattacactatttatgtaaaactaaagcgggacccattctacaagaattgctctaatcgttgtcaaggaggaggggattatcttatgaattaataaaagatgcaaatgaagcatgcctatgcctcataaacaaaaaacagttaataaagtgaaggccgtagaacctgagcgcctgatttttggacggaatttccgtaacgcacggaatatggcaaaactaagccaacgtgaaatcgcagagaaaacgggattaacgcaaaattggatcagcatggtagaaaacggaagatcaaccattagtattgacaacatggctaagcttgccaagtgtgtcaatgtcccactttggaagcttctcattcctcctttataaccatcactgccgccttctttcctgttgctttcttctagaaaatttaaattcttttgttgctattttcacatcatatatagtatattaaagattcgcaagaaaaacatgatataattagatcaccacatcaaaaatggacttcctcgcactctcccaggaatgcgcgccgtgggttgccacacaaactatggccgcaatcgtcaaaaccgaatctggctttaatccgcttttgattagcgtcaacggcggtgcgaaactcgttcgtcagcccgaaaacaaggccgaagcagtgtcaaccgctcgatggctgattgagaagggctacaacattgatttgggccttggccaagtcaattcatccaacttagtaaaagtcggcctgagcgtcgaagatgcctttgaaccatgtaagaacctggccgctgctgccacgatcttgcagggcaattttcaggttgcaaaaggcaaggtgcatgacgaccaagcggcacttcatgcggcactgtcggcctacaacaccggctctttctccaaaggcttcttgaacggatacgttcagaaggttctcaacaatgccggtgttaccgtgcaaggcgtaagcgcgcaacaggccgtgaagttgaaggccgcaggagaaggcaaagcctccccgcaaggctcgggtgtgaacgtgtacgacaccaataccaatgacgtgatggtgtactgatatgaagctgatgattattgaatcccccggcaagattgaaaagctgtcaaccatccttggcgacggctggaagatcgcagcgagcgtggggcatgtgcgggatttaccgcaaaaagaaatgggcgttgctgcgcctgatttcaaaccctcttacgagttgacggaacgcggcgaaggcgtagttgctaagttgaaaaacttgctcaagcaggccgatagcgtgtatctggcgactgacccagacagagaaggcgaagcgattagctggcacttgcagcagtgcttgaaactgtccaatccactgcgcgtgacgttcaacgagattaccgcgaacgcggtaaaagcgtccctggtagcaccgcgaacgattgacgtgaagcgggtagcggcgcaggaagcgcggcgcgtccttgaccgcctggtgggctacatggtcagccctgaattgagccgtctaactggcaaacgtctatcggctgggcgggtgcaaagccctgctgtgcgcttagtcgtggaacgcgagcgggagattaaggcattcaaggtgacgaaccactttggcgcaatgctgtttttcgcggacgcgaaaactagcggcgagtggtcggctgaatggctaacgaaaccgaagttcgttgccgaagacaacccgtatttcatggacagggattttgctgctgccgtggctcaagtcaaggcggtagtcgtcaagtcgtttgacgaaagcgaagccaagcgcagtccgccgccaccgttcaccacgtccaccatgcaacaggccgcaagtgtgaccttgggcgttgaccccaaagccgcaatggacgccgcgcaaaaactctatgagcaaggccacatcacctatcaccgcacggataacccgaacgtgtcggatgagtcgctaggcgacatttacgcggtgtccgtcaagctcggcctggacatagccgagaaaccgcgcaagttcaaagccccagcgggcgcacaagtcggccatccggcagtgacccctacacattgggaagtcgaagaggcaggcgagacaagcgaccagaaggcgctttacaagctgattcgtcttcgcgcgattgcctgccaattggccgatgcccgctatgcggtgcggactgtgcgccttgaggcggcgcagccggtcggcggcaagaatgttgaatttgaagcgcggggccggacactgatttatcaaggctggctcaagctgattgcaggcgaccagacggaagaggaagacggcaatgaaaaagagtcgtcgaacccgattcccgtttgcgcacctggcgaatgcctggacgtggcgcgcggcaagctacttgagaagaaaaccaagccgcctagccattacacgcaagccacgttggtgaagaagttggaaagcgaaggcatcggaagaccagcgacttacgccgccatcatggacaacatcgttagcaggggctacgtcaaaaccgaaaagaaatatctgtttcccacggaaaccggcgaattgattgttgattctcttgttgggaagtttgaattccttgacttgggattcacgcgcgagattgaagaaagccttgaccgcatcgcccagggcgaatctggttataaggcggtcatcgccaaagtgcatgaccaattgaacatggagctttcaacattacaagtttcggccacaccgaaacacccttgtcaggaatgcggaaagccgttgcggcgcataccaggaaaaaacgggcatttttggggatgttcaggatatccagattgttctgtgacgtttccggatgaaggcggcaaacctggacaaaagaagcctgtagaggtatcgaatttcgcttgcgtgaagtgtggtaatcccttgaaacacctcgtcaaaaaaggaaaaggcgggtatgacttttggggctgttccggcttcaaggaaggctgcaaagcaacatacgaggataaaaaagggaaaccaaattttgaaaaggcaaaatgacgatgaacgaagcggcaaaatataacatttagtgcggtcgttataatggtgtgaactgcaaggcgcgagcatgaacaccattagcgaatcggagttagcagatttcgtaaagaaccaggcggtcaagaaactgcacattattcaaaacgatgctgaaaaatatgaaattttcgcaaccctgacctggaaagaaggggattggcacctagtaaccacacgcgggaaacctcgtgaatgggcaagtctagataggctgtctcaccacattagagaaaagtatggcagcacattgccgcctatcagcctgaccctgagaaacatcctgagcaagtaactttcaaataaaacggagtaaaaaatgcaaatcgtttgcctgtatcaaaaagtaaagtcggccattactgcaaaccacgctgcgaaaacgcaacaaaacaagactttcttgaaagtctcagcattgctctgcctgaccgccgtttttctaactccagaaatagcaatggccgccgcgtgggacaatgtcgcacagcaagtgctagcgatcttaacgggtggcctgacccgtaccatagtaatcatcggagtgattgcctgcggtatcgctgccattgccggtaagctgtcctgggattgggctatcaagatcatcatcggtatcgtgcttattttcggctctgcttccatcgttgattacatcatctctgccgtggcttaatcatgagtaacagcacacaagacgtttatacagacccgctgtttgtcggcttgacgcgccccgcaagtatattgggcattccttatgaagcgtgtgtcgctgaattcatggcgatggggttgatattcctgagcgtaaacaatccgctttaccttgcactggccttaccgatgcacgccgttctgtacctcatcagcgccaacgatccgaaaattttcagttccatccacatgtggttgaaaacgaatggacgctgccggaattttctgttttggagggcctcaagtttttcgcctcttgccaccaagaagttggagaaagtcaggctattgactcgcatcgttaaatattttcgcgtccgcgaaaactaaaggagaaatatttatgggtgccgcattcaagtacgccgatgcgttgaagaatgaaaagtcgacagccttatttattccctattccagccacgtcaccaaaaatgttgtcaagctggtaaacggggactacatcgcaaccattcggatgcagggtgcggcgcacgaaagcgcagacgtacaagatattaactcgtggcacgatcagcttaatgggtttatgagaaacatcgcatcgccaaacacggcggtgtggtcgcatgtggtacgacgtgaatatggcgaatttcctggaggtgaataccaaccaggtttttgccatgatttcaatgaaaagtaccgcaagcacatggcaagcgaaaagatgcttgtcaatgagctttatctgaccgttgtttatcggcctcagccggtgaaggcggtcaagtttctggacattttcagcagcaaagcccccaaggaattgcaacaacgccaaaccgaagaattggaagttgttgaagacctcatcagcgttgcactggcctcccttgatcggtatgagccggaattgatcggctgctacgaacacaagggaaagatgttctcggaggtattggagtttctcgcattccttgttgacggtgaatggcgcaggttcccgcttccgcgtacagaaatccgcgaagtcctagcgacttcgcggcctttctttggcaagggcggcttaatgtcgctcaaggggccaacatcaacgcaattttgcgcagcagtcacgattcaagaatatccgtcgatcacttgcccaggcattttgaatgaattgctcgggatgccatttgaattcgttctgacgcaatcgtttagtttcatttccaagcccgtagccgtgggtcggatgaagcgccaacaggcccgcatggtgaattccggcgacgtggccggtagccagattgatgaaattgacgatgcccttgacgatctgacttcaaaccgctttgtcatgggcgtgcatcacttctctatgatgattcgtgctcacgatcaaaaggcgttaaatgagcacatcagcgataccggcgcggttatgtcggacagcggcatgaagtgggcgcgggaagacgcaggcattgccggtgccttctggtcgcaattaccaggtaattttgaataccgtgttcgggtaggcgacattaccagccgcaatttcgcggggttctccagcttccataactttcccattggccgcattcgcaataaccaatggggcgatgccgtcacgatgttcaagacgacttctggcgctccgttctacttcaacttccacaagggggaagaaggtgcggacgcgaagaaatcagccaagctcgatccgaaccacaaagaccttgcgaacacggttgtcattggcaaatccggcatgggtaagaccgtgctggaaatgatgctgctggcccaaacacagaaatttgaacagccgcagttcggtaaaaagctgtcttgcgttctgtttgacaaggacttaggcgcagcgatcggtgtgcgggcgatgggtggccgttactaccccctcaagaacggtgttccttcgggattcaacccgttccaaatggaacccacaaccagcaatttaacgttccttgaaacgctcatcaagcagcttgtaaagcatgaaagcctgccactgacacctcgtcaggaacgcgaaattagcgaagctatcgccggagtgatgggcgcagccaagcaaaaacggcgcatcggtgctttgctggaattcctcgactccacagacgaaaacggcttgcacccgcgcctggagcgctggtgccgtggcgggacgctcgcctggctgtttgataaccctgtggacacactgagcttggacaactgcacgattgtgggctttgacgtgacagagttcttggacaacgacgccacgcgaaccccgacaatcatgtatttgttccaccgcattgaaagcctgattgatggtcgccgcattccgattttccttgatgaattttggaagctactgaatgaccctgcatttgaagacttggcgcaaaacaagctggtgacaattcggaaacaagacggattccttgtcatgttcacgcaatcgccaaagcaggttctcaagtcgcccattgcctacgcaatcatcgggcagacagcaaccaaaattttcttaccgaaccctgaagctgactatgacgattacgtcaatggtttcaaattaaccgaacgcgagtttgagatcgtcaaaagcctgggcgagaagtcgcgccagttcttgattaagcaaggtcaaaactccgttgtcgctgaattgaaccttcgtgggttcgatgatgaattagcggttctatcaggcaacaccgctacgtcattactggccgaaaaactcgtcgctgaattgggcgatgacccagctgtttggttgcctgaatttcatcgcattcgtaaaggagctatcgcatgaaactgtttaaaaaacccttcggcccatttgcgttgatgatcggtttgagtgtgggtaatctcgccaacgcaggtatgccggtgatcgactgggcgaacttggagcaagcccagttgcaggtggaagcctggaagaagcaatatgaacaaatgacatcgcaaatcgagcaggtgaaacagcaatacgaatcaaccaacggcattcgcaacatggggagcttggtgaataaccctgctgcgcgtcagtaccttccggctgactatgcaacgatcttgagccagggcgttggcaattgggccgctatccggtcggctgcggaaaaattcgacgtgtcgatgaccagccttgctgccaacagcgataccgctcaagccttccagcaagcggccaagcaagcggccctgaaccgcgcttcggctgaaatggcgtattcgacggctagtcaacgattttcggatattcaagtcttactagacaagattaacaacgcgccggatgccaaggacatcgccgacttgcaagctcgcatccaggtcgaacaagtgatgatgcaaaacgaggccaacaagctgcaagcgcttcaactgttggtgaatgcgcagcgtgatttgcaaattcagcaaaacaaggaaatcagcatgaagtccagcaagggcggtatgcctacaggctggtaaatatccggtcgtctccttctggaaaaatctatctttaggaatgtgatgaaaaaactatttttgcttctgctcatcgcggtaacagtgttgctttcggcttgcaatgatggagttccgaaagtgaaggaccctcataacccgcttgatgctgacggtaagccaatcagcgggagtgaattcatagataaatactgcctcggaaagttcaccaatgaggattgcatcagagtggaaaaggccgtccgtatgaatactaggggtcccatgccgaaagggtggtaaataaccagtcgtcctcttctggaaaaatccatctttaggtaatgaatgtgatgaaaaaactatttttatttctgctcatcgcggtaacagtgttgctctcggcttgcaatgatggagttccgaaagtgaaggaccctcataacccgcttgatgctgacggtaagccaatcagcgggagtaaattcatagataaatactgcctcggaaagatcaccaatgaggattgcatcagagttcaaaaagcgatcagtgccgattcaagtaagggtggtcttccgaaagggtggtgatctatgggtgcttctgttgcaagtaactttcatttttactcgcgcatgttcactgagttgagcaatgcgctgaatacctatgtcaacgacaccgccgcgaacatcattggcgctattacgccggtcgcaaccaccttgctcacgatctacgtgattttatggggttggtcgatgatgcgcggagtgatttccgaacccattaccgatggcgtagggcgcattgtgcggctggcggttatttgcgggattgccttgaaaatcggctattacaacgggttcatttctgattttctttggaatgccccggatgaaatggctaactatctcggtggtagggacggggaaagtaacgctgcgttcctagatacgctgatgtccaaaatgtatgatttcggtgatacctactaccaaaaggcgcaagccaatacaacgctgggtgttcctaatcttggctttttgttcatgggctacgggatttgggcggctggcatattggctacagggtatggtgcttttctcttagctctggcgaaaatgggcttagctatcaccctcggcattggtccgatattcgttttactcatcatgtttgaaccgacaaagcggttcttcgatgcttggctcggtcagacgctgaactatgtgtttctggtgatgctgacggcggcggccattaagctgattatgacaatattggaaaagtacctcacgagtgcaatgggtgtagatgttgacccctcgctcgacaaggcattgcccgcgattgtcttttcaatcattggcgcgctggtcatggtgcaaatgccctccaaggcgtctgcgcttggcggtggcgtggcaatcagcaccctgggtgcagttgcttttgcatatggcaaggccaagggcagcatgagcgccatgcggcctaccaatctgagaagatcattcaacaaggctaggtccgattttcgtatcgcacgtgacgcggtgcggtcaactgccggtatgcctttggctgtctatcgcaaggttacgggagccaacaagaacagagttgcaaggagataacgggcaagaaggggcgtattttcgcgggcgcgaaaatagccttttttcgcctcctccgatcgaaataatataaatcgatttatcaaaacatgatatattgccacttcggtatgagaatctacggcataaggagttttatgcgttacacctttggcattgtgactgtctaccttctagctggatgtgcgggttccccgccaaaaccgccagaggtgaaaggcaaataccgccctatcaaccgagttgaagcacccgcgtcagcaggccgcaatccggttaattctctcaatgcgctgtgcgggaatttgaatgaaaagcaatgtcgataaaaaagacttcgataactacttgaaggaagcgcgcacctgggaaaccgataaggtgcatgacctgttgaagtctcgcaaaaccgcctggtgggtggctggcgcttccgctgccattgcctttgtcgctgtccttgctgttgccgcgctgacaccattgaagactacggaaccctacgttatccgcgtgaataacaacacgggcgcggtcgatgtggtaaaggccatgaaggaaggcaagacaaactacgacgaggccataaacaagtattttgttcaatggtacgtccgctatcgtgaaagctattcaagagaactggccgaagattactactcgtatgttggtatcttttctaacgacgttgaacagcaaaagtattctgctgcgtttaatccgaaaaacccgcaatcgccgctgaatatctatggcacttacgccaaggtcaagattgatattcaaagcacctcgttcatccattcaaatgtcgccttggttcgttacaccaagaaggtagaacgtggccttgatcagccgcaaatcacccattggctcgcgacaatcacattcaagtatttgaacacccccatgaaggagaaagacaggggaattaacccgcttggcttccaagtatccgaataccgcaatgaccctgatgcagcggtaaataacatcaatacaccggacaacaacggccaaaccgcgccgcaaatcgttacgcctgcggaggccgttcctggtgttgccgccttcccctctgcaaccactcccgcgcctgtacctgtagtgccttccgttaaacagtaaggggccagccatgaaaagacttctcttgatagctctgttggtgccgactctggcgatggccgagttgacgccccccaaaggcaacttggacccgcacattcgtatcgtcgattacaaccccatgaacttagtgaaactatccacgttttacggggtttcaacccatgtgcagtttgccgatggcgaaaccatccaagccgttgcattaggtgacgatcaggcttggaaagtggttaaccgtgaaaatcatcttttcatcaagccgcaagcgaaaaaggctgataccaatctgacggttgttaccaacctgcgaacctatgaattcgccctggtggtgcatccgcgtcggcccaatgattcgaccgcctgggctgacccgaacctgattttttctctgacgttccgttaccctgccgatgaagcggcaaaggctgcggccagcgcaaagcaattggccctgaaatccaaacttagcgaagtcaaagccaagttgtcggatgcagcaagggtagggaaaaacacggattactgggtagccggttccgaaaaaattagccctactgctgcacgtgacgatggccgatttatttacttgaagttcaccaataaccgcgatatgcccgctgtttatgaagtggacgaaaagggcaatgaagcattgattaacaccaatgtaattgacggcaacaccatcgttgttcagcgccttgtgcggcgcttaatgctccgcaagggtgatgccgtggcctccgtaatcaacaagtcattcgatttaaacggcggtattgataacaccactggcacagttgcgcctgatgtggaacgtgtgattaagggagcgcaataatgggattttttgacaaactaaaaggcgacaagaaaacaggaaacgaacccaacgacgacctaccggatatgaaccctgaacctgcatccttggccgatgcagcacgccagacaaaagcgcagcaaaaggaatttcgcgcccgcgaaactgccgccactgctgtcgctgaaaacgagggcttaccctcggtgaatcgcaatcgcggcaataacaagctggtgacgatttttggctttatcttcatcctgagtgctgcggcggcgatgattgttgccgtcaatggtgacaaagacaagaagaagaaaaagcagaagcagcccgatcagaaagaacagattgccaacaatctgcctccgcttgtcattcctgccgcacctgcgcctatcacgctgacccctgccgctccggttcctttgacaggccagcccacgggcgtccaagtgcctgcaatcaagcctggaactagcggtgcgcaacctatcgcgctggccggtggtaaggctccgcaacaaatggggaccaatggtaagcccgttcaaacttgggaggaacgaaagatgggcggtacattgctggtggatgccaagcaaagttctgccgccgcccatcgtgacgctgcacgaccggaggtgatgtcggatgacgacgcgcaagatcagtcgatggcatcgaaaaggcctggtgaccgctccggtagtggcgatcaaaacaaactggccacggagctggaaccgacgatcaccaagggtgtttcagcctcgatgctacctgaccggaatttcctaattaccaaagggacttcattggattgcgcgcttgaaactgcgcttgatagctccgtacctggcttgaccacttgccgcctgaccagtgatgtttattcggataacggtcaggtgcttttgcttgatcgcggttcgcaattagtcggcgaatatcaaggcggcatgaaacaaggacaagtgcgtcttttcgttctctggacgcgcgtcaaaacaccgaacggcgtgattgtttccctcaattctcctggtacggacgcgctaggccgttccggtcttgatggttgggtagataaccatttctctcaacgattcggcgcagcaatccttatgagcctcgttcaagattccgtcaaagaactgttgagaaacaacaacggcggcacgacgaatgtgtatggcggcacgatcaacggtggcgaaaagatcatcgaaaagattcttgaatccactgtgaatatcccgccaaccatcgtcaagaaccaaggcgatcacattcaagtcatggtggcacgcgatttggatttttccagcgtctatgggctgtgggtgaaaaaatgacgaattcgactgcccagaaacaggatgatgggcggtcatctgaaatgctcgccgaatatatggaacctttgcgggcgttccttgatgacacaagcctgaatgaaatttgtgtcaatcgccccagcgaagtctggacagaagggcgcaacgggtggcaacggttcgatgttccctgcctgacattctcacattgctgcaagttggcaaccctgattgccagctacaatggcaaatcaatcacggctaacaagccggtgttatcggctgctcttccaggtggtgcacgtgtccaggtcgtcattccccctgcctgcgaaacacgcacggtgtctatcaccattcgtaagccgtcgatggtggacaagacacttgacgaactggaagccgaaggtgctttcgatcaggtggaaaacgttgatgcttccggcactctgcacccgtatgaagtcgagttgcttgctctcaagaaaagcaatcgcatcaaagaattcttgaagctcgccatgcagcacggcttgacgctggtgattgttggaaaaaccggctcgggcaaaaccactatcggaaaaagcatcacaaattgcatcccaacagatgaacgcctggtgacggttgaagacgtgcatgaaatgttcttgaaccatcaccccaacaaggtgcatctgttctattcgcgtgacggtgaaggcagcttaagcatcaacccgaagcaagccatagcatcgtgtctacggatgaagcctgaccgcattttgctgacggaaatgcggggcgatgaagcatgggaattcgtcaaggctgtgggttcagggcatccaggcatcagcacggcacacgctggcggggcgctagaagcctttgaccagattgtggcccttatcaaagatagtgctaccggcgcgcatttggacgccgcatatatcaagaagcgagtttttgagacggtcgatatcgtgctttattacgtccaccacaaactacgcgaaatctactatgaccctgaatttaagcgaaaacaattgggttaaggcggtggttattatcgcgctggttgccgtggtaacgggtgtttgggcttacctggccggtggcatctttcttatggctttcggccataagtttgaagaatccacgcctttgaccttgtatcagtattggttttattacggggccgaaaagcaagcaaaaaaatggctctatatttcaagcggcatttcgctggccgtgctgctggctccactgcttttctttttctcgcatgcggaaaaaagcctgttcggtgacgctcgctttgccaagctacgcgagattaaaaacgctggcttgatgggtaaaagaggcatcatccttggcctctacatgaatacttacttactgttcggcggtagccagcacgtcagtatttcagcgcctactcgctcgggtaagggcgttggtattgtgattccgaacctgctttcttggccagatagcgtggtttgcagcgacatcaagattgaaaacttcgccatcacaagcgcctaccgccaaaagcacggccaagaatgctatctgttcaatccggtttctaccgaatacaagacgcatcggtataacccgctttcctatatcagcgaagacccgcattttcgcattgatgacattcaaaaaatcgggaacatgctgtttcctgatgtgcctggcactgacgtaatttggacagccacgccacgaagcctgttcttgggcatcgtcttgatgctattggaaacgcagggcaagctagtcacgttcggccaagtcttacgcgaaacgctgcaagacggcgatggctctgtctacttcggcaagatcatcaacgaaagggccaaagcgggcaatccatactctggcccatgcatccgtgcactgaatagctatatctcgattgcctcggaaaacacacgctccggtgtgatgacctctttccggtcgaagctggaactgtggatgaacccgattattgacgcggccacaagcggcaatgactttgacctacgcgacttgcgtaaaaaacgcatgtcggtgtttgtcggtgtgacgccagataacttgaagcgtctagctccgttgttgaacttgttttatcaacagttgattgacctaaatacgcgggaattacccgaacacaaccctgcattgaaatatcaatgcctgttgatgatggacgaatttaccgccctcgggaaactcgattgtctggccgatggcatcagctttattgccggttatggcctgcgacttctgccaatcttccaaagccctgcgcagatcgtcggtaagtatggcgaagctgcggcggaaaccttctctacgaatcacgcggcgcaaatcatctatccacccaaggtgacggaaattaagactgcccgcgagatttcagaatggctcggcttccagactgtcaagggtgtttccgagtccaaggggaagggcatcttcaccaaaaaatcagaatcgcaaagcatatctgaccagcgccgtgcgctgctcctaccgcaagaaattacaagccttggctctaaacgcgccctggtggtggttgaagactgcccaccgattctggcgaagcggattcgctatttccgcgagcatgtctttatggacaggctcaagagcgtttcgcctagcttggcgaaattcggtaacaagctgccgaatgaaaagcagttgaaggcaatcattgagtccggcgaactggccgttaaggtgccggtgattgatattgacgagcatatctgcatggtttctggttctactgtcgcccagacaacggtagttgtacagtcgaatggaaaaactgaagttcatgtttttgaacgcctgattactcctgccgacatgccgaatctagccaagatcgccttggctaatttaaacatcgatttttcggcggtcgaaaaagcaaaggatggccaactggatgaagcagcgcttcattcctacgtcgaaaacctttccaaacaatctttagacaacgtgtgaggtaaaaccaatgaacgatgaaattcaaaataaaagcttagatttagaagaatttaacttagaaatagcaatacaaggagcaaaagacctggttgaagtaaccaaaaaaattatcaatgaagaaactcaagaaagatacagaaatttagagctagaagcctacaaaaagttaactgctgtggacgttgcgcaagcaaatgcgttgatagatgccgaacgtattagtgatggacaattgaagaatccgattcggcttgatgaagccaaattagccgccgctatcattgatttgtacaaagacacctacagcgatttaaatattgaagcttctagggacgttgcgcgagcaaatcagtttagggaaaagatggcgaaagatggagcagaacaactgattgaagcaaaaaaaatggccttgatggcttcattttcggatgactatcaggttcgaaacaaagaaaataacgaggccagccgtttggaggaagatgcctacagaaagttagctgctgtggacgttgcgcaagcaaatgcgttagtagcgaccgaacgtgaccgtattagtgatgaactattgaagggttcgattcggcttaatgaagccaaattgctcgccgctatgcgtgatcttaatccagaactttacaaggcaattgagtctggcaaggcagaacaacaacgcagggcggcagaaccgggaacgaaggaacacagggcggcagaaggagcaaaacaactggttgaagcacacgaaatgacaagccgtttggaggaagacgcctacagaaagttagttgctgtggacgcttataacgcaaaatattttgtaaaattagaatgtgaccgtcgtggtattaattatggcaatgacgggccgaattattttaatgaaacaaaattcgccgccacatacgagcatcttcataatgaagctaacaaggaacgtttagaaaaaaatagcagccctatacttagaggggcgatggcgatagaaggagcaaaattactagtttcagcagccgaaaatgaactgaaggctagtttttctgaagacgccggagagcgtgacttcttaaaagaaatatctctgagtttggaggatgacgcctacacaaagttagctaatgtggacgttgcgcaagcaaatgcgttggtagcagccgaacgtaggagacttcctgatggagaattaaaggattggattcggtttgacgaagccaaattcgccgctgctatccgtaagcttaatccagaaactgacaaggcaaaggcaatcgagtctcgcgcagaacaaggcatagcggtagaaaaggaaacgaagaaaccaacggtgatagaggcggcaaaacaactggttggagcaaccaaaacggccatgatggcgcgcttttcaaagacagttgaagctcaccataatgccattgagcctaacattgaacgcgaacagcaacagctttcggcggaagacgacgccaagcgatcaacctcagcctgggtgaagaaggccgaacccgcgcagtcggtcgccacgggaaaggcatctgtgcctggaaacaatttggaatcggacgagattttcacggccaaccagaaagacgttaagctggtggtaccgtcagagattgaaatgcaatatctccacgtcggtgaaaagttctatcacccgaaaaacactagccttgtggcctttgaagacaagggcaacaaactcgaaacgaagtccaacagcgaagccattgcccaatcaatggttcgtattgccgaagcgcgcggatgggacgaaattaaggtcagcggctccgaagtattccgcaaggaagtctggcttgaggccgcttcgcgcgggatgcacgtcaaaggctattcgccatctgaacaggacaaggccgaattggccaagcgtgccgcgtcggtcaagaccaacaaggttgagcaagacaataagccgtttcgcgcccgcgaaaatgaagccaacaagactacggccacgcctgaacccaaagtcgaagcagaaaagccggacagccactacaagaagttggcccaagtgttcgcgcttgaaacccccgtcgaagctgtcaagaagcatcctgagttggccggtgctttcgctgcggccgcggcaatgaacaagaaggccgaatctgacggcttgacgcctgaacaactcgctatcgttgcggctcacgtccgccaaaacgtcatgaacagcatcgagcgcggccacattccgcaaataaagatcaaagaagaagtcgaagtgaaactcgatgccaagcaagaaaaggagttaacccgatgaaagatgagttcattctccaattaaggaaagcaggtatctacgttaaacaggaaaattccaagattctttttagaatcgatccgatttgcgatgttaatctggggaagtcagtaattcatgacgatctatggtgcgaatctcttagaaagaaaggagcaggttcccatgaacaggcttttcttcaacacccatgatgatggcgtactccaaccggacagattcaaccgaaaagctcgctgtgcgagccaagccgcgccagaaggagaacttaaaattgaaattgtattctactgaaaaagtttctaaagcgttgaaggaattggccgaagcacccgcgctacctcttaaatttatatctcacagcgaaaccattgcgaagctgtcgaaacacatcaaagacatgcattacattaagaactacgatgctcgagatatagcaaaaatgatcagtgaaaaaggaataaagattaagttgaaagaagtaaaatgcattcttcaaactaaagaaaaaaattagttattacaatccaaaagattaaccacccattgaatttgaataataggatgaatcaaatgaaatcaattacatactcttacgacaataaggatgctaaaatttttattttaggaatgtcggtaattgcgttgatgcaggcggcagtttctatccttcttaagacagatgaactatcgagcacgttagtatatgtattaatgaagttggtgccaattatacttggcatatttggggtttacttcggtgcggtcaacctaattcttagaaaaattcaagcaaaaaagctaattttcattattctagggatagttttaattaattttagctcgtacttcttgggatacttattagttcattttctaagtgtgcgctgacgctggtagccaacggtacagcgtcggaatagacacacctaggttcttggccacgtcctttgaagggactccattggccaacagctttttggccgactcgatcttgctgtcggtcatcttgcgcttgcgacctcccttgcgcccaagctgcttggcgacttcaagcccagcgcgggtgcgctcgacgatcagctctcgctccatttcggcgagactagccatgacgtgaaagaagaagcgcccagacggcgtgccggtgtcgatagagtcggtgaggctcctgaattggacaccttgcttgtgcaactcgccaaccagatcgaccagttgtttgaccgatcggcctagccggtcgagtttccagacgaccagagtatcgccctcgcgcagcatttcgagagtcttggccaagcctggccggtctgcccgtgtgccgctcaccttgtcctcaaagaccttcttgcatccggccttggccaaggcttcgcattgcagttcaaggttctgatcctgcgtcgagacacgcgcataaccaatcagcatgaccagcacaaagcgctgtactgatggatattaagcttcatatcaccactcctatagatcagtaggctagttcgggccgccattggcgcaagatggccttgaagtcttcttcatagcccaggctgtcggggtacttgctgacgcctgcgaccaaggtaaacacggcagtcatgtcgaccgtgattgcctcgtcaagtccccatagcgcagtaaggttgaagcctccgcaactgtcggcgttccaccatgccagcaggaaattagcaacgtgccgactctggttggtgtcattcttggcgatgaggataaggcgctcaagcgcagcttgctgcgcgtcggtcatgtgtgattttttattcatgtgtgcttcctccaggtcgactatgtggggggagaacaagcagtggtgtgaacctgccctgccagtgcggttgtgccagaaccttctgaatcatcagcgtgttcttgccgtcgaagccggttgcctgcacctcggtgtcctcgctttgcgtcaaagcgcctcggcgcagaaggtggtcggcgtgacaatgcgggtacgaccgaagctgccgcgttgcagcagcccggcacgataatcgccggtcacgagataatccgcctggccctccaatgccatcgccagcaggaaggcatcgttcggatcgttgaccttaatgccctccggcagaggcggcagcgcatccagcatgatcgagcgtcgcatgttgttgaccatcgtgccgaggcgatgcggctggagcacatccttgaatttcgcgtagcggcttgcgcggcgcagttcgtcgatttgcgtggccgatgtcacgaggtcgaagcgatccttttgccacgcgcggtagatggtgtccggcaggccgtgcggcgacagcagcgcactgagcaatacgttggtgtccaggatgacccgcatcagtgctcacgcgcccattgcacggcttcgttcacgatggcggtcaaatccgcctcactcacgttggcgttcgccgccttcgcatcctcaacggcgcgctcaaagatgtaggtgcgtaccgcctcttcgatgaaacgggaaaggtcgcccttgcgaccgccgccttgcgacgcaaggaacatgcgaacggactgatccgtgtccggggacacggcaagattccagcgcacagtgctcatgatgacctctattcaaatatatacacatatacacatatgtatttatacgttttatttgccgcgcctgcaatggttcggtcacgatcttggctgttcgacaccagaaggaagtgggatacaccagctgatgtctcagatggcggctggtgacacgactgttgggtctaccccatgtgtgattgcttattattgaaactcattttaatagtattgtatcgagaataaagattcaagaactattttcgagaattgcaacgccttgattccacatgtcatgccggttgccttggcctgattttcacaaaggaacgtttttgagaataaggaatgtgttgataatagctacacacgaagtttacaatgtatatctactgtaaatacaatcggagagggcgatgcgcgacgcttccatcaacttacgtgccatgcctgagcagcgcgacttgattgaccaggctgctaatctattaggcaagaatcgctcagacttcatgctagaagctgcgtgcgagcgtgcgaaagcaattatcctggatcaagtcttttttaatctggacgaagagaggttccggcaattcactgtgttgcttgatgggccacaagacaccaatctcggccttaatcgcctgatggcaattaaggctccgtggagcatcggcaatacgtgaatatgcagatttcgacacctcattcactcacggcagcgcatcgactcgatgaattcaattgcggtgagccatcgctggatgattggcttaaacgatgcgcattgaccaaccatttaaacggggccagccggaccttcgttgttgtcgatgccaaccagtacgtgcttgggtactacgctttggcagctgggtctgtcgcgcatcaagaggccacgcgtgctatccgacgtaatatgcctgatccagtgccggtcatggtgctcggaaggctggctgtagatactcgcgctcaaggcatcaaactcggtgcggccttgcttaaagatacggtaactcgtgtacagttcattgcagagaacgtcggcgtcagggcattggtagtccatgcgttgaacgagcgcgcaaagcaattctacgagtactatggttttcgagcgtcaccaatgcacctgatgaccttgatgcttccgattaaattctagccacgcatgataaacaagaaaaggcgcgcagaatggatagaaaagccatcgctgaacgactccgcgcgcttgcttccgatgataaaaaacgatctaatgcagcttattatataaggagataatatttaatgaaaagatataaaaattccggcttttttgatgaccttatacagacaccttggtgggtatctgcgatattgagcgtactaagcggtacctttttctttctaatagcgcctcgtcttcatctgccagatattgcaacgaactcgcttatgttatcgcttgatacggcgatacacacaccagagcttctggatggtatagggtggtttttagttctatttttcatgactacagccttgttctcatcatgcagagaattgtggaactggtggaacacacggtgatttaactgctccttatttcgtgctgacgccttctgaaaacgacagtcgcggcccctgtcacattcaagaaaaactcttaaaacctacaaagacaagcaccaatactacaaaaatgattgctgccatgatggctactatccaaccaagtatcagaccaacggtcgccaactcatcacctttcaatgcttctggatgacgctgaatctcagcgcgtgccatgtgcccagtgatgatcgcacacaggcttccgacaactggtaaccaggttaagcctaggatgccggtgattaggcttgccatggcgagagtgcttgttttctgttgagaaatgtccattccatttcgaccaattatttaaataaatcttgatcatatcgtaatgcgatgagtgtctttcttttcacagcggcagcgccagatgcaccttgaccgctttttcaactgccagcatctccgctttggaaagcatgccaagacaagttttgagacggactttatcggcagccataatctgatcggccatcgccttgctttgctggccaccgaccgtgacgacagcctcacctggataaacccttcccgtgttgctggtcactggtacgacgaccacccgcgccaagttcctgttcgccgcctcattgctcaagatgatggccggacgtgtcttgcgaatctcactgtctaccgacggatcaaactcgacccaccacacctcaccgcgcagcatcgtccatatcctcggcaagagcgttgcaccactccatagcttcaacctcacggtccttgtcctctgccattgcccgatagccgtcatcaagcgttgtatccaagacgtgcgggcggatcagatcctcaatgaactgactcatacgccgcctgcctaccgttctgtaaagcccttcgtacacgacctcatcaagcgtaattgtcatcttccgatgcataggatgcttcataacacttaatacgtattacattatacgcgtaccccgttatattgttccggcgacatcgtgcggatacgtaagctgtatggtgtttcggcgatatacgagtgtccctcaaacggtcatttacagcacaccggccaagcgacataacgcttggccatttttgggctagaaatgtatctatacttataattttttcaagttatacttaccatggggtagagcaagcagtcatgtcaccagccgccatttcgatcatgactgcccaggccatcactttttgagccggtcagccagtcgtgtcatcagatccatgcgctcatgaaaaatagccacgatcagagcaggcgcttcctcacgcggcagacagaagacgtaatgatgttcgtaacgccccatccgtaaagccggaaaaagcgaactcatgtcgttgaacgcaccccggccctcggcgaggctggcgataccccgttccaacgtggcgatgtagtggcgcacctgcgcgttgccccattgcttggggtagacccaacagtcgtgtcaccagccgccatctgagacgtcagctggtgtatcccacttctttctggtgtcgaacagccaagatcgtgacggtatcgccatcaatgcggtagtgggccacataaccgctatctccgaagtcaatcagccattccatgtactgttgaatgttccagatggcttcaggagcgaagatcacccgtggcatacggacgctggcaattcattttcagtgccccaactcgaaagccacttctcgacttcttcagccgtcacgtgcaggtcggttgcccgaaactcttcccatgccttcagcgtgtcctgccggaacgcctcacgcttttcctcacgctcaacgtattgcacgatcacctcgcgcatgcatcggccagatgctgcacacgtcctttcagctcatcatcaagcttgatggaggttgccatgcccatgcgaactcctatagtaaaaagtagtacctaataactactataattactaatgtcgaactgaccatctagcggcactggcaaggcaggttcacgccgcgcgactacgccgccctgacgccgctgatttgggagcacgtcaacccgtatgggcgggttcgatctcgatataaacacccgcctcgacctgccgtgatcaagatggcggctggtgacacgactgcttgttctaacccttcttgtagataaaaaaacacagatattatttgatataacaatcagactttactttatttagaatatttaaaacactattatcaaaataaggaccggaaatactattactaccagaataaaatgaattgaggccaatagcataatttccacggacttgatcagtggtgttcagttcaccaatccaagctcccccgcttgatccatgtcccattggattgtttttcatttcaactattgagttatgaacactgtttttggaaccctcaactcttagtaaatattttccatcataataatttttaggataaccaatagctgtccaattattgtaaggaatgttcgttttcaatccaaaccagccaggaccctttctatatgcaacaataaaaccataatccttgtcatagttataatctttattgacatttatcaagttatcgggaaccgatttacaggatgttcctgatattttaaatctttccttctcacgaaaacgtggggcaaaaacaatatttgtgtaccaatgtccattcaaattcatcagacagtgacctgcggtcatcaatacccgattactggtaacaaattcagcagtgcatgcataatcttgatgagaatctggatctataaaataaagtttacccgcattccaaaaggggcgatggtttacatcagcctcttctggaacgccagctgtagttttcatgccaggaagagagttgtccccatgcccctcattcacatcaggagatgcttctatgactatcgatttttgttttttgtcaatcggtagagaacttctgaattttgtttcagcctccattctggataattcatcttgggatatcattggcatgggaatcggtttggcagcacgcattctatcttcagtccaataattctcagccgcttccatctcagcaacagaatgaggcgcatcggcgtaggagttattctctgaatcctggttatcgcctcttgaattggcaaaagcaaatggtatagataaaattaaaggaacagaaactaatatagatttattcacagaatctcattatgttttaaattggatcaatcttatcaggataattaactaaattaactatttgtatggaaaataaaaatataaattgataaaatgagatacacgccattatagctactgtgatattttagaacttttttgggtcgtctcagaaaaaagatcgcaaattaccctaagtctgcgcggaggcaggtatccaacggtaaagcgtagaggaacaggcacgccaaggttcttggccacatcattggcggcaccccaccccgctggccagcagcttcttggccgactcgatcttgttcaagcgcgaataaatagagatactctagaatctaacccgtttgccatcaaacagggtttttattctaatacttcaacatcgttgactgcactcatgatgattttttctacttccgcagcatgtgaaagatgtggcacatggctggctgccacattgacgatatgagcacctattttttgagccatctctttttgcagcgctggctgaagcataagatcattctcactcaccaaataccatgatggtttagtttcccaagcggcagctgaaacctttttttcaaaattggcgccgcgtatagggtgctgagtggcgatgatcaggcgagtttgctcaagggggatatcctgagccaagtatttttccacaccttctggcgttagcatcaggaacccttctttgtcactgctgagatgattatatccagaaggtaatggatattttttattcagatcagcaaccgactctccctcggatggagcaaatgcggcaatataaactagggctttaactcgttcatcttgtccagcttcagtaatcactgctcccccataagagtggccaacgagcactacaggtcccgtttgcagagcaagcacacggcgtgttgctgctacatcatcttcgaaagacgtcagcggattttgaacggacacagcattcagcccttttgcctggagctgatggattactttgttccatgtagaaccatcagcaaaagcaccgtgtacgagcacaattgtcggtttcagtaaaacggttggcttatcagatgctgcggatgaggcaaaagcgataggacggtatgcgttcatatatgagatatgtacatcagttccaatctaatggcaattggtgttgatattggcatattgttcatgaactcactaggggtcgtctcagaaaacggggtaatgaccacatagctgcaaaaagcgccatctatccgatcaaaatgcaaaagtgcatcattgatagatgtatggccttctgcgcggctgaaatgggtttacgccccttgtacttgcccgcagccttggcacgggctacgccctcacgctggcgctccaacatcatctcccgctcgaactgcgacacgccagatagactatccttgaaaccaaaaaagaacattgatcggatagatggcgctttttgcagctatgtggtcattaccctaggtattgtgcttgcctttttacctaaaaaggtataaaatgccatcatggtcgataatagagaaaccgctcgaatggatcgcgagcagctacaaggatctgatggcgttgccgcccgacgtgcgccggcggtttggttacgcgctgtcgctggcacagaggggcgaccaggatgacgcggccaaggtgctcaagggcttcggcggggcgggcgtactggaagtcgtcgaagacgatgccggtggcacgtaccggacggtctacacggtgaagttcacggaagccgtgttcgtcctgcattgcttccagaagaagagcaagagcggggtcgccacgccaaaggtggacatgaacatcatccgtgctcggctgaaggtagccgaggcactggcacaggagctacgaaatgcaaaaacgaatcattgaaggcgtcgaggttcaacgcagctcgggcaacgtcttcgccgacttgggactgcatgacgccgaaaaactcaagatcaagaccgggctggtgtatcgagatcaggaaggcgatgcacgccctccgggctgaatcagcaagaggcggcgaaacgcatgggtatcccgcaaccgaaggtgtcgggcatgatgcgtggcgacttcaccaacttgtccgaacgcaagctgatggactgcctgaatcgcctcggctacgacatcgagatcaaggtacggccggccgctgagccggtcgggcatctgacgctcgcaaccgcatgaccaggaacgccatgagtcgcagccgtctatcactcagtatctggggtagtgaccacatagctgcaaaaagcgccatctattcgatcaatgttcttttttgtttcaaagataggctatctggggtagtgacaggtaaggtattcttgttatttagttacttttctaatgcttgttgaaattcttgcgccagagcatctgctgctgccgtgttgtagtgcccaacgggcattgaggtattcacgacggaagaccttggcatctcaacctttacccttggtgtcgtattagctgccataaccggcttactcgcttgtatggtgtcaaacgtgggaaagcgagcgacgagccagttttcccacttaccggcacgcttaatgagagaggtgcgataaacagcattatattgcggagtacgcgaatggtaattcgcagcccgcgtccaaatgtcaccttgatcattacgtaagtgaccacgcaaacgccacgcagccagatcataggaatagcacccacctcgtgctacgtcttgtggcgtgatcccatattgacgtagctcgaccagataggccgtattgaactgcattggtcccacatcatgtgtgccatttgtgttcctgacccattggcctggcttgccgccctcttgttcggctactgccaatacaatgtttgctggaacttcgtacttgacggcagccgtaatcgagcaaacaacgcgctcttgtatttgcggcggcagatcaaggaagggcatcgtgattactcatgctgcttacctttgttcacaaaggcggcaacctcatcattcatggccgtctcagaacctctctgagctgcacctgctaggctgtcacctttgaagtcattctgccctgatgccgcatccatactgttacggattgcggatgcaaccttgccgccagtagtgtctgccactcgttctttggcggatgcaatcacgcttccagccttgtctttagcaacttggccaacacctttggcaagactcgttcccatgtcagcggcaaagcgtccagttgtacccatcgccgacatgaagctgctactgccgccagaggatactccagcagaatttccacctgatccagaacctgatccagaaccaccaccgctcgccatgttttgctgggcagactggaatgctgccttgagagccgaaacaccccccccagcgcttgataaaccagcagcgagagcagagcctgccgtcgccgctacagcagctccggtagccgccgcagcaatggctgcacccgcgccaaagttgccaatgccagccgtagcgccaccaccgcctacgatgcttgcgaacatcggaggaatcttgttcaccaacgcaagcaaaacgatggacgccacgagcatgaccaaaagcgccttcattgtgatcgcaccggtcgatacagccgcgtaatactggtcgatgaacgacttgccaatgccaataatcaagatcattgcaaatagctgcataccgaggccgatcaccgtcttgtagtagctaattgcaatgtccgaggtccaccggccaccaccgaatcccaataggaaaaccgctccataggacagcagccaccccgacacgagcagcagtagcatgttcacgccaatgagagccagcacaataagaatcacagtcgaagcgatgatgccaacggcagagttaacaggcgaccggatggagctatcgtcaataacctttgaggtaatgtcaaagccgatatcgacaataccggatggcgagagcgtgttacctaatcccgtagcgttggccgcaatttgccgcagcgaatcgatgatcgccgtcgacatagctggagcgttgatcaggagccaccagaagaagcccattaccgcaaagaaccggatcgtctcggcaagaaactcctgaatgtcagccttacgtaaggccatcattccataggtccagaccatacttagcagtgctaagctccaaaacagccagctcgcgtatctgacgatctcaccagaccaagtatcagcgacctgatggaaacgtccgagaatgttgtcaaacagaccgacgctatcgacaggtgcttgtgcttgcgcttgtgcggcaaagagcaataacgccaatgcaagcactggcattacaggaatcctcttcataggtcaccattcacgcggcttgctgggcgtgtagctgcccgactgaaactgcgcattggcggcgctacgacaattctcgtcacgcatcacaaggtcaggatcagccttacatttttcgagcatgactttccgctcgtcctcgtgctgtttgtagtattcaatcgaatgcaccggttgactacacgacgcgagcaagatactccctaaacacatacaaccaatttgaatagctcgtttcatttatatttccttggaattaccagtttttaaccggacttttcgtatagcttcccgaacggaacctctgatcagccgcttccatcagcgcggccttatctgcatcgttagacgcccgagtcgcgaccgcagcagcctgcgcagccaacatgctcctaatctgtaaaagttggttggtttgcgcactggcaagctggtttgccgcctgcaatgcctgcatttgtccctgtgctgtcgttgcctgcaattgcagcttttggagtgtcgcagcgtcgctaatgagtgtctgttgttgctgatcaatgcctttaagcactgcatcgtttgcatgtttcagcgcttccgaattgtttgcctgcgcatcttgcagagcttgcaactgcgaggacgagcaacccgcagcagtaaagcacggcgaggtgcggtaatagctaacgtcttgatagcgcgacaggtacgaatcaatgctgccagccttcttcttgtagtagctcaatgtgtcttgcgccaccatgagcttgttcatcacctgacttgcctggtcccaaatgtaagcgctcggtgcaaccgtgttttgcaacatgttttgatactgttgtaactgtgtctggtactgctgaatctgcttctcgacagccgcaacctgctgcactgcactgacgatattttgttccagattgctgatgtcgatcaccggcataccggcttgtgtttgctgcgagatgccaacaagcagaacaaccgctatgccagcatttttgatggttaaagcatttttcaagaacgttctcatgctcatggctccttggcgtcagtaatcaaaagatttgtacggctttgtgaaattgaggtccttcacaatgatgatgttgaaacgatagccagggcgaatttggagagtcggagcaatgttcagattcttcgagatcatctgcgccgttacgttgccgagctgttggccgagtgcctgactcaactcactactggcggttggttggctgtagatgccactgttgtttctgtttcgatccgtcgcatacgacgacgcagccgtcacacctgacatcagcagtgcagacccgaagatgcgcgtgtaatgatgattggcctgatcgcgaaaacccgcgtaaccagcattatccgctcctggcatcgcactgatgtccagtgccttgccatcgggaaacaccagacgttgccatgcaatgaggatcgcaccttgcccataccccacgttactgttgtacatgccgaccaagcgtgttccctgcgggatcagcaaatattttcccgttgccgtgtcatacacgtcctgggccacttgtcccatgatttgaccaggcaaatcagagttcacgccgctaatcattacaccaggaataacgccaccggcacgaatctcaaagctagaacgcggagcttgtatctcttgatctagcttccagcgatcgccttgcccattgttggcaaactgtgagaaatccttgttgctggacggtgcagagacctgcaagagatgtggactgctctccgaaccaccatcaccattgtcaaggctcgcacgaatccttgccaactgtgcttgataagaatttgtcagatcgccacctgctgcgttctcgtcgatttgccgtcgcaccttcgcaatctgtgcgagcatttcttcgcgtgattgtggtgtagccgttgcactagctcctcgtgaggtcattgacgtgcttccagaaccaccaccctcatagggtaatgcgatcttggagttggccttaatcgcttcctgaaactgctggagcttcgccatacgaagctgttgttcatcaggattgacaggggccgacaagctatccggctgatgcggtggcatcggtggtgcgtcaggattgttgaccggcgcaatcggaataccagccgtcccgctgacagccggtggtacctctggcatagccgaaggaataaggcctgggccgtggccgctcagcacttcattcgccatcgtgcttgtgtcgatattcttcttcgactctttttttgtatccgagtgggccactgcgactttattattcatacgcttgatagccaccttcgcaatcaataaagcaaacaggcaaagtgcaacgattccgatgatgagcggtaggttattgacccgacgaacgccgcttctcggcttggagtttggcgaggcgtcaggtgacatttgatcgttatcaaccattctcattactccttacgaacccatgcacctgccggatacagattgccgttcgtggcaaccacgaatgctctactgatcgactgcacaccaatctgaaccgtgatgcggtacagattcattgactccggggaatcgaccacgtaactaaggggtaagcctgatgttggattcgctgtgacaagcgctgcggtcgccgcagatttggcaggaacagcctgcggctgcgggttgtactccaatacggaataacctttctttcgcaacgcggacagcaatgctgcaccgtaggggtccgtgattgtctgttgaaaatccaagcgcgtatgtgcgggcggatacagcgccacgagctgggctaccgttacatcggccattgttttgttggcttcaatggacaccgccgcataattaccatgcatgttttgtgttgcacagctcgtcagagcagcaagcatcaccacactcatcatgaacttacgcatggttagttccccctcgtgatcgttaccttctgttgactcgaaccaacgccggatacgaggatcgctttgtcaaagatcgtatctacgatgtagcgggcgtcttgaacgcgatagttcaccatttgcgtctcatcatctttgaacaggcttccgtccttatggacgacaagcagtgctggcgcttcactttgttgcatctttgaaggcatttcgatgatggttttgcggccatcgttgtagacccgaaccggcttccagcgaaccgagccgctcactacgtaatcaaagctgaggttccccaagtactcaccggtatgcggaatagtgttgtcctggcgtacctttgtttcgcgggctttgattgcatcccacttcgctatcgcgtcttcggggtacgtaaacgatacaaacggcatgagctgcgtgcgactagaacgcaggcggaagtgatacgtgcgccgatccgtggtgagcacgagcgtcgtatcaagacccacatcaagaggcttcaagatcagatgtattatttgcgacgcacctgaacctgtgacggctggctcaacatgatagcgaggatcgccaatgttcgtgccattgacgttctcacctggctgtaaagcaatgtcacaaacttgcagcactgcacacatgatcgggtattgcttgccaggtaagtacggccagttgatcgaaccatcagaaccttggaacggcttcaggtcctgaccctcctgccactttttgccgatagcgacagctgccttttcctgcgccgtcaacttcggctcgtttttcgagaaatactgatcggccaacgggtcggtgcccggagctgcgaatgtcaccatcggcactaagccgagaatcagagagtggattaaagtcttttgcatagcgaggctccaagcttcaaagttgcttcgaccagttgtagtctttgacgaaaatgaaatgcgggttgatcaacatcttctccggcttcacttccgtatccttgttttgataaatcgtcacgagcgcacgcatcatgtacggtgctcccttgagagaaccgtcacgcccccgcactgtttcctgccagtcaatttgccaagtgtctttagactgctggagaacagatttcacatcgacgttcaccatttcattcgcagcgcggttgaacggattagtttctttcgtaccgttcaggtattcctttgtcttgagcgtcgccggatcgttgggtacgagatagccatacgttttcagcacagctttgtgctgcaaccctgcatctggcgtcacgagacgaatattcgtaatgaagtcggaaacggcagtgcgataatcatctacccgagcctcgggaatgtgatcaggacgtgtcatcgaaattgtgttgccactaccgtcctgctggaacaccaagggaatgaatttcgattgacttccgatgtaggtcataccaccgacagcagcaagaccgatcaacataccaagcaagccgacgaagatacccacctggctatgttgcattatttggccaacgtgactgttccacgaacgtcgcgcattgagataaggattcgccgtgttggtgtctggcttttccttattcccgaagggatttcttagattgacactcatgctgctactccatagtcattgggactcacgtattcatcaaggtgcagacccttaaggcgcagccactcatgaacccaggcttcaccgtgcaacgcttcgagcttcctgatcattgcgatagactccttatcggtagaccccacgaaagcgagagcaagtggtccaagcgcgagctggtacaggcgacgccccttttcagagacgtagtagtagtcacgtttcggcacggctgatgcgatgatttcaatttgacgattgtttaagccaaggcgaccgtaaatctcggcaatcttttcctcacgcgcattcgggttggccaggaatatccggcaggcggtcgattccgtgatgatgtccaaaatgccggactttgcagcctcggaaatgctctgcgttgccatgagtaccgagcaattcttcttcgccattgagcgcagccattcctcgatcttgtcgcggaatgttgtgtgagcaagcatcagccaagcctcatcaagaatcagcagtgtgggtcgtgcatcttcctcactcagtgattcttcgattcgcatgaatagatacagtaaaacaggcagagcaaacttctcgccaagacccatcaactgttcaatctcaaatgtcatgaagtcggccagttcaagaccatcttctactgcatcaagcaggtatcccatgtttccgtccacggtgtacggcttgagagcttcgcggatcactgcgtcctgcacggtcacaataaactctgacaacgtggatgatttgctctcactcatactgaggatcgcttcggcaatcgcgttgcgctgtacaggacttgtaatcacaccattcaaggcaaggatcgtatcaatccattccattgcccatgcgcggcgggtgcgagtatcaagtcgcgacaatggcgcaaacgcaagcttgtcggtgttcgatgcaatactgaaatgatgaccatgcatggctttacatgtcggatacatcgacaaacccttgtcgaaagcgtagatgcgtgcacctagataacgacgccactggaatgccaccaaagccagcttggtcgattttcccgtcctggttgggccgaaaataatgcaatggccaagatcacgcacatgcaaattgatacgcataggagagtttccactcgtcacgccatgcagcaagggcggagcgttaggagggaaaagcggtgatggcgcacgattttcacctgtccaaatcgtgctggtcggcagcagatcggcaagattcatcgtattcaacaaaggacgacgcacgttctcgacaccatgccctggaagagaaccaagataggcgtccatcgtgttgatcgtttcgacacgcgcagtaaatgccaaggcgttgattgccttttcaagtcgtcgagccgactgttctacttgctcgcgactttcattcatcagtacgacaacactggtgtagtaaccctgcgaaacgaggccactgttcgtttcagcaatcgctgatgaggcatcggccaccatcgaaaccgcgtcttcatcgatgtgactggtattcgtattgaatacctgatcgaagaaaccacgcattttctgcttccactttttacggaatttctcgagatgagacacagcctcgtgatgatcaagaaaaatgaaccgagaagaccaccgatattcgataggcaattcggccaataccgataagattcctggatatgactccaagggaaacccttcgatagcgacaacctggatgaaattacgaccgattttggggacaacaccagggtatagctcttgcccgccgatgagcgagtcaatgtacatagggttgcttgggagctgtatcggatgattcagaccagttacacagaagtggagccactgcaattgctgatcatgcgttacagtcgaaccatcttccttagttatttttacgccgcgcaaacgttcaagctcaacagccaaggaaagcctgttttcgagattaatcacctcccgcttgaagtggtcgataaggtgtgcggtgcgcgtcttatcgttgggcttttcagcatcatcatggaacataagttccacaaatctgcgttcggccaacacagggggaaaccacgtgaccgtgactacgaagactccctcgtacaacgtgcccatgctctcgaacaatcgcctacgctcctcatcgactgctgccgaaaccgcatcaggaaaatgagaaagacttggatggctgtaacttggagcgggtcagcgcactgcatcgacgtgaaccatccaagcattgtcaaatgatgcaagcgcttggttgatacgaaaggagatcagctcccgctcagcttccgtagcactcgcgttatcagcaccgcggtacaaccacgacgccatgaacgagccgttcttgccaacgtttttgagaagcgtgcaaagcaatttgaacaaagagtgtatttgccccgaaaattttcgtttataacagaattaagtggtattattaagaacaaggcacttagtaagtggaaataaaggatgctcgagataaaacactatatcaccgaggacggacgtgatttgttctcagagtggcgtgacaaggtgaaggacatcaaggtgaggattgctatagacagacgcttgtataaccttgagcttggaaattttggtgaccataaaccatgcagggaaggtgtctgggaacttcgcatcgacttaggatcaggtcaccgcatctattatgcgcaggtcgaaagaatagtaatcctattgctttgcggtggcattaagcgttcacaagaagcagatatattaaaggcttgcgaattattgaaagactggaagcgcagaacgtgaaacgagaggaagattgcgaacttaagtaaaggtagagcgccaatacagagacagagagagcgagataactagtccaccagagagtgaaatgactagccgctaaaatgctaaagagagagcgccagagagatgaaagatagattacatgacgatgcaatgaccgatatattccgtaaagatccaaactacgcagtaaagttgcttaacaacattcttgaagatggtaaccaaggagagcttctgattgctcttcgccaaatgacgaaagccttcggtggtatgtcaaaggtggccgagaaagcgcagttaaacagtacacatatttaccgcacgctttccagcaaaggaaatcctgagattcacagcttatcagcgattcttaagacgatgggtatgcgtcttgctgtgcagccaattcaaccttcgcggaggcaagtaacgagcgctaaagcgtaggtaggaacaaacacgctaaggtttttggccacattcttgggaggaacacagctggccagcagcttcttggctaactctgaagccaactaccggacgtgaacaaagcgggccacgtccggtggtcgttgtctactagtcccgccatgggaattccgcaggaagaataaaactgcgttccaatcaccaacattaccggagggataatgtactttttcacgttgatttttgattttatattctttttttctctgatgatattcttgatgttaaaggatatattaagtggatttgtcaattggttttcctacatatttcatccgagaattttttttgtgggtatattgttaggcggccttggcttgaacttgcttccatacagcactatagacaacagcaagggattcttgagtattattgatatgatagctcagctacatgttggccctctgagtttgcctttggctcttttgggtatatctatatttatgatttctttgtcatacatctttagtcgttattaaaaagcttttcggttttaacgctctacgtccttgcctccacgcttcggcccagtttgttcctggccattcgttttcctgtgaatcttctcggcctgcttggtgaatctctgcgccaaatctcgtttaatctggtgccgctcagtctcaatgctcggcatagcctccacaaaggacctgatacgccatgcaagcaccttattttgctcaataggcttgtagacatctaataacatttttgcgtctctatcaacgccattattgctagttcccgaccgtcgcatttcagaattgggtcttccattccgtcccatacgatcaggtgcattcggctgcaaaagcattttagaacttgatcggtgctgaaccacaccgaggcaggacacgtttcgcaagctggagacggttcgggacggtgcttggcgtccagcttttgtaagattggactgatatacactggcggctcgctgggctggcctggcttgctctgcgctgattcgctcgtagtttggtcgatcatttctggcttccttctggttaaaagttttacgagtgttctcgcgttcaagctctgccgcaacagtcaaccaggcgcggcggatttcgcgctgacgtgctttgatggcttcttcccaaggcttcggaggcaccggcaagcctttggactcggccactagctccatagcagcttccttgaccttggcggctttgacctttgaaacacgcggctcgtgagttttatcgccgcgctcaatgtggcgaattacattaggctcggccttcttgaccacgccacggctgcgccttggtgtcgcctcggcctctacgccctggtctcgcaatttttctgcaaaaccctcgcgccactgatgtaaatccgcctttcgcggatttaaccgtatgccgtcgaaaccaaggcatttgacggttaggtggcaatgcgggtgcggctcgtcggtatgcaagacaaaaacatattcatggtttttgccgaatgtcgcttttgcaaattcacgcacggatttcttgactgattccgagtctgtggtttctggcatggaaagaaccatatgcatcgtgtcgcgctggtttttatgccgcttgccatcgccaaaatccttttcccaatccttgaagaactctttaacttcctccttgccgttgaatatctcgccacgatcattctccatttctaatttaccgttccgtgtgatgtagtccaaatgcgccttaacgtgacccgcacctttaccaaagccagttaccttaaccatgacttcggaagaacggccagtcacccgcttagcagttgatcgcagcttcttagtgttattgactttgcgctttacagccggacttaatgcactgcctaactcagcctcaatgattcccattagtctgcctgccatgcgttttggctagcccgaactaatgccctaattgccgctcggttttcaacaagcgcctggtgtaactcggccagcttatctagccttacgcgctcggtttcatggaaagccgaattaagcacgtgggcaatctggttgatattgcgaccgatggcggcaagctcccgattgctcgccagcaagactttgatttcttcctctgtcattaccggctgcttggtcagatttgattgcaccagggcggcaacgtacctgcttggtgccataccttttgacctggcgcgctcctttgtggcctccaacaaaaagcgcgccatcctgactgtcatacggtcaatgtccaccttctccgccttctccgcatacggttctagcgatgtgtcggtgtcagtgtcctggccggtaacagccaagacaaccgcccgaagtagctcggactccgacaggccgcgtgccttcgccatgctgcgaaagctcgtcttggtttcaggctcgacaactgttttcagtacgggcatagagggagggtagggggtgtatttggtgcaaaattgtaccaaatagcggttttaaaacctatcctgccctagatttaaccctctaccctccctcatgctttttggtacagaaaacgtacttgaaacactcaataaatgtaaatttagcatacttaaagaatacatttgcgtactatatgcgttgacattaataaaaaataattacataatacgtacattataaacaagaaaaggcgcgaagaatggatagaaaagccatcgctgaacgactccgcgcgcttgcttccgacgataagaaccgctctaagacagctaggttacgtgacgtgattgatgatgttgaagccgctttatctgccggtgtccctcgatcttctgtcctcaatgaacttgaggcgcagggtcttcaaatgtcgattgcgacttttgaaaccacgttgaggcgaattcgacagaaacgccgaaaactgcaaatttcgtcagttatcccctcccagggacaacctgagaaaccacgcgaaacactgacaccagttatcagctctcaccatccaacggatttagacaaaataatcggtagtaagcccgacctggcagcattagcaaaactcgcaaaaaggaagcaaaagtgaaagtagcagttatgaacttctcaggtaacgttggtaaaaccacagttgccggtcacttactgaaaccacgcatgggtgatgctccgattttctccattgaatctatcaactcgggcgctgacgctgacggcctcaatgttgagaaaatgaaaggtaagaaattcggtgaacttgttgacgaattgatgccactggattcggcaatcattgacgttggcgcgtccaacgccgaagacttcatgaaactcatgcaacaatatgatggctcacatgaagaatttgatttcttcgtggtgccggtggtcaaggaaaagaaggttcaggccgatacggtaaataccattcgcaccctgcaaaaactcggcatcgaacggaagaaaatccgcatggtgtttaataagattgaagtggatgaatccgtaacagatgaattccccgcgctgtttggcttagctgaatcggaaaagtctttcatcgttaggcccgaagctgtgatttactcgaatgaggttttcgagcggttgaagactatcggtaaatcgcttggcgatattaccgccgacaaaaccgattaccgggcgcaatttcgccaggccaaagacgatgacgaaaaggaaatgtgcattcgcatggtggccttgaaacgcttagctgtcacggccaacaaaaacttggacgatattttcaaaacattgttcaagtaaggcagcaccatgaccgccccccgcacaacacgtgaagccctcattgccgaattgctcggtgatgtggatgggcttctaacccgcgttgaagctctccctgtgatggtggcagctgccgaagaaaaaatgaccagcacggccaaggcacttgaagacgctggcgacaagtaccgcatggcggtaacggccttcaccgaacaggcaaagatcgacttgtcggaatacttggacatgaaaagcgaccaggcagggcttatagctacaaaaacggtcgaggaacaacgggccacgctacaagaagctgcacgcctggcgttccggtcggaagtatcagacaaggccgcaagccttagccttgtcttgagccaagcggcgaaagattttcggcgctcaatgtggacacggctgattgaacataccgttaccgctctcgttgcatctggctttactgcaagcctagtgtacttaatcgtgaagaggtgaatgatggatcgctgcctaatcgtttttgatctggatacaaagttgcttgagcagcactatcacaattcaagctggcgcaatggatacgcagacattcagcgcgtcctatatcgccatagattcaacaacattcaaggaacggtttacctgagtgagagaggcgtcagacaagcacatggaactcttgcattgcaagaggttgccatacgcttccaatggttcgacaagtgcgtttcaaatgtccagttttacgacttgtcggacgatttcaatgctcagttcattattgatggcgtcacccaggccagagaagcttttgagcgtcgaattggaatgcttcgacatcaattacttgatgctggtttaacctcggaaaagatcgaagaaatcattggccaacagaagttctctctagaaaatgcgacgcaaattgcattaccaaatcctgatgattaggaaagcaaacataagcacgacccacgcgccaataacgacataaggaaggttgcggccaagccaattgaaaaacaccccttcgatttcgatagagttgccgaaaatgtcttttccgataactaccttgtttgtgaaaaacagtcggcgaataagcgactcacccaaacttttaccctgcgtcattggacgtcgccttgcgagatacggcaaccacacatatagcattcaatcactttatagcgtcctttccatgtcctggggagaaatcgccatcaatataaagtcatacgtccacgcaatcaaaaaccccaaaaagctgatagtacctaatccccacaccatcgcgtgtttatcgggaaaggcatacaaggcgaacaaccaggcaaataacatcggaattgataccatattgcaaactaaaatgaccggcaaacgaagccagtacataacaaagaaaaccaacaaacggacgatcagccaaagccaaacgaaggcaacttttagcgtggcagccttgggcatcgcagctttgatcttgtcggcatcaaagtcaagcgcaggaaacgaccgtttcgccttcggaaattttaggacgttactcatgtcttcacactaccatttcattagttataattaaatttgcatcgttgtgtgtaccgcaatattcatattggggaaattttcacccagtattttttatgcaattttattaatgttaatatttgtacttttcatgagtctaattgatattaaccatattctgagtttaataatttaagtgttgaatttacatattagtcaatgacctaccccgccctaccccgccctaccccgccaaactaggcacgacccatcgccacttcgtcatcggcatcaaaaggcactactcccaacgctatcgcggtttctacaatagcttcaagtccccttggctccggcccattcacaccatgtttcgtataaccattttttgaaactacagcacctcgccacatcttatgcctaaaccctggcgcaagaatatacattggtgtaataccgtactcttctcgatgccggtttatgtacgctacataacgacaaacaagccgaaatgttttttctgacgcaaggtcttcatcactcttaaaaacgatacgattactgggcagtaacttaaaatcaccggaggtcatcacatgagtacgcaatggttttccccatacgatcgtccaaattgcattaaaggtgtaaccaccttttacgcgcttaatgtaagcctcacaatgccctaacacatccttagaaacacctggcccgctaaaataggcaatccaaaaggtttcacctacttttaaattccgaatagctacaaaatgagaataattaagcctaagggtttttatccatttttgtgcgtctttatctaatgaatctgaaaacataattaatccttattgctggtgatctgacctaatctattaggttactcagcctggcaactttccaggctgagttaaatgcgagattctttatatttttggaggaagagcgttcggataatatttcgcaattatggcgttcatcttgtccactaggtcgagacgcttaaaattaatatgcccattaccgttgttgaaccactttataatgacgtattcattttcaatctctgttacgtctgtgtcaaattcccgtgctttcgtcaccatttgttgaaagctattacgatgatctaattctggctttccgtcgaagatgtggaacgcacgcaggatatcatctactttgtttgcattctcgtactttggatattggctacagaaaccattacgagatttctcattgaatagataatacatgattatgcgctttccgaacttgcatggctggttagtcttatagtcccatgatagatttttgaagcactcgataaccccacgctcgaacatttcaccgcgcgcttcatgaagtgtggtgaaagtggctttaatgttatcaaagttaaattcaggaactttcaaataaccttcttttatttgattgtcccaatcttggcgggctttagaatccataaaactacgcaatcctgattctttcatcaggtattcccatgcacctttgtcaacagtattaattatttcttcgctcatattctctctttccttagaattaattcctgaaatatcaatatttcttatgtgagatttattaactctctcaatcattatcttaggaaaaccgatatgcgcatgatccgccatattttttacttcacaggctagatctaaaatatgattaattttttccacaacgccgttacgctgattaatcatgttttcaatgctgacgctcttaataagttccatattatcctgcaagttaatttgttgattgggctgttatttgctggtgattcgtcttcaatcaccatgtagttattatgcccatttccctactatttgtcaagcttttttaactgacaatttaagaataaatagccattacgcaacgtaaatcaattgattcttcctatcaggatcgccaatgatcgggatgccgttcgggtcggctttcagggtggttcttgttgactagtttttccttacgttgacctttattcggatacctttttcctggttaacctgctgtacgtcgtgcatacggaaagaaccaagctacctatggttcttatggtgtgtttttgtgaattctttatttaaatagggtgtgtaaagcgcagtgtgggcaaaggccctaaagggccggtgcgcgtagcgcattgtccatacggagcgttaggcggtggagcttgtgggcagagacttgcggcggtgggcaacggtttttctgttgtccacggtcgtaagtcggtgcgcgtagcgcactgtccacaaatccacggcctttttgcttttgcgtgtttcgtagtctgtattttcgcgcccgcgaaaatcttgaatctcaaccaccagtcattcaggccataccctttgcagggatgcggacctgggctatggcccaggctcctacctgcaaaccaaacagtccataggactgtttggcgttggggcgcatggccttctagctattacggtgttcctcaacctcttaggttggcttccaggggggaaggcgttaggccagttttctatccctgtatctcaaacacaggcttttttatttaactttcaatttgcttccaaccaggcactgcgcgctgcgattggcggtatttttccaaggtcttccaaacgacccttacagcctggtcaactgattgcttcgaccatccgaagcggtcgccgatggattgaaacgtctgaccttcgacaagggccgctcttgcggccttgatgcgatcatcagagatattcagaaacggccgaacggcctcaaattcggctggggtcattcgccttttggctctcacccccctcctcatgctcgcttctccagacatttagccaaagccttatcgcgaattccggcaaagacagaaattgcttgttgaggattgcaaatgtggcaatgccgatcaaaggaggctttcgggtcgcccttcatcccctcgccccgccccccttcggtaaacatggcgtagtagctcatcaacgcatcacacgcatctacaattttgctgttgtctgcgttcttgatagcatcccccaaacggccaagacagtgcagcgagttggcaagctgcatcacatcaagcccgacttcgtgcggggcaaggtctttgtacttaccgttatatgggctattcatgcgaatagccttcgctacatctgcgacatagttcagcaagcggccaagctccaaattaacattgatcggcgttggtaaagtagcctggtcggacacggttgaatgaatctcgttttccatcgttgtagctcctgaaagtggccgctggcctcgctggttgattgatatattgggcctggtcgccttactttctgacgctaccaaacacattgagaaggtgaaattccgcgctttctacaccatgcaggaaagcaacaagggcaaaagcgccgtcgccatcactggaaaaagtaccgttgcggaagccttggattaccgagcgtcctacgtcttgattgacactctttccagcgtcatagaaagaatgtaaccagccttctaccctgtctttttcgtccttcggcatcgtctcaagaatcgtcttcgggctattgccgtgctcaaagatattagtataggccctgttgaggacatcaacaggggaaaggatcaaggggcgcggcgactcgcttccgttatgcgcatcgctgaacgggtcgaatttcgcgcccgcgaaaacgtccagttggccgagttcttcatggctgcggcctttcggtgtcttttcgccattgtcggccttgggcttcttgctcggcttaacttcttccttgacagctgcggccttgtcgcgggcgttttccttgccgcgcgtcttcttgaggtcgtcaaccagttccttagcctttacagggttgatcttctcaaccatcttcacagtgttgataacttcaacgtccgcgctcacgttctcgataacaaggcgctttgcctgctctggaagattcagcaaagctagcatcttggaaagccaggggcggcttttttggtgcttctcaagcacggcgtcaacgctgcccaacttgtcgagatcacgttgaatcttcttcgcttcctcaatctgcgtcaggttcttacggtgaatgttctcggccatctgcgcgtcttcggcttcctcgtccgacatttcgcggatgtaggcagggatttgctcaagcccagccagcttggaagccctgtaacggcgctcgccagcaatcagttcatagccctcagagttagaacgcagcaagataggctgtaacacgcctcgaaccttgatgctcgcggccaagtcttcaagggtgttttcctcgtcctcgaatgattcgcggatttgggtttttacctggatcatgtccagaggaatcaaggaatactgtgcgccctggtcggcaaataaggcgtcaatgcctgcgcctaaggcgtcggatgcgccagcgaatgcgttttctttggtggcggttgcggtagtcacgggttcaggttccttgatattagtggtctcggtcagtgcgatcttggcgttcatttagcgagcttcccgaggatggctccgcaagctgcacgccattcgtgcgcggccttcaagtggccttcgccactggtgccagtccacaccggcacacgttttgcaatggcctggcgcactggcgctcgctctggcagaacttccggcatgatggccgcgccgtagcgttgtcgcaaagcgtccagcgcttcgcgttcctcggtactgcggttgttggtcttcatgggcaggatgccaacatgcttcaagcgcgggttaaatccctgggtgcggacaacgtgaatggtttgcattaagtcggccacgcccgctaattcatagaggcccacggaaacaggcgtgacgacataatcagcagcggccaacgatgccatgagacgaacacccaacagcggcggcgtgtcaatcaggcaaaggtcaaagccttcgcacaagcggcgcaatgcttgacctgggcggcggatgatttggttttccgccttgtcgatagccagcaagccgttatcggcgcggatgatcgccaagcggtcgttcaaggtttggggttgttcgccgtttggctcagcgtcgtacagcttggaagcaacaaggcccgccgttgcgccctcctttgcctgaaaggtcagcgatgcgctgccttgcttgtccatatcgacaagtaacacgcgcaaacctacttccatcgcggcataggctagatgcacggtcagggtgctttttccgactccgcccttttggttcgcaacagctaagattttcattactcgttttctctttaggtttacgacatcaattctaaggggttagtgtgataatgtcaattatttttagctgtcaattcatcggaaaatcagacgacgggccgataaaaaacggttggttgaaacccaggccccggcatggccggggcagggtatcggtggttagaaatcgtaatagtcatcctcatcagcgggcagtgcatcgccatgccgcgcgttccccaccttgttgttatcttgcttcttgccaagcatctgcatttccttcgccatgatttcggtggtgtagcgcttgttgccttccttgtccgtccaattgcgacttcgtagcgcgccttcaacgtagatttgcgaacccttcttgagaaattcgcccacgatttcagccaagcccccgaagaaaacgacgcggtgccattccgtcttttcctccttatttccggtgtccttatctttccatgtgtcagtggtggcgacgctcacggtcacggttggcgtgccgtcctgcatgtagcgaatgtctgggtctgctccaagattcccgatgagttgcattttgttaagtgatgccatttttgaaagctccttcttacgttaatgaaattggttttgttgccccgtaacccacggggcagggtattgcgaattaagcggctgcttctgctttgtccagcacctcgaggatgcattgagcagcccatactccggcattgttccattggcgaacccatgcgccacgggaaggcgaccacttgaaaccgtaagacttcaatagtgcgcgcgtgtcttcgtttggcttacctggaaacacaaacataacgcggttttcctcagcgtcttggcgacagatgtagccgttaccttctttctctttgctctcgcgcttattgcgcttttctagttcatcaatcctagctttgacgcgacgcgcgttcgcattgttgttagacaacgaaaaaccaacatgccctaaacaattcggatttatgatttcggcggcctcgtctgcggtaaaacccttggccatcaaggcggcaatctgcgcttccttgggcttgttggtgcgaatgatcttattggcttccttcatgcgctcccgggatgcttctatgttcgcaagttcagcgcgcagcttttcgatggcgtcagggtcatcgctggaaatgccacccgttccaacgcttgcggctttgtctgcgtaatgattggccttgtcatgcaaagcaaaggcttttttataggtgttatgaatgcgatctctaaaattgcggtcgcgttgttcgctgtgatgcccgatcaaaataggctgcccgaatgggattgattcacccatgctgcgggcgcgctggtaggtgcttacgctctctgcggcagcttctgatgcgtatttctcaaaacgagctttgcgggcagtttgtttggcttcatagctattcatggtctcggttccttttacgttgattgggctgttatttgctggtgattcgtcttcaatcaccatgtagttattatgcccatttccctactatttgtcaagcttttttaactgacaatttaagaataaatagccattacgcaacgtaaatcaattgattcttcctatcaggatcgccaatgatcgggatgccgttcgggtcggctttcagggtggttcttgttgactagtttttccttacgttgacctttattcggatacctttttcctggttaacctgctgtacgtcgtgcatacggaaagaaccaagctacctatggttcttatggtgtgtttttgtgaattctttatttaaatagggtgtgtaaagcgcagtgtgggcaaaggccctaaagggccggtgcgcgtagcgcattgtccatacggagcgttaggcggtggagcttgtgggcagagacttgcggcggtgggcaacggtttttctgttgtccacggtcgtaagtcggtgcgcgtagcgcactgtccacaaatccacggcctttttgcttttgcgtgtttcgtagtctgtattttcgcgcccgcgaaaatcttgaatctcaaccaccagtcattcaggccataccctttgcagggatgcggacctgggctatggcccaggctcctacctgcaaaccaaacagtccataggactgtttggcgttggggcgcatggccttctagctattacggtgttcctcaacctcttaggttggcttccaggggggaaggcgttaggccagcgttttgtgcgaagtcttgcttatatgcttttagcctataaggctgaatggatggctgcacaaataaatatgacaaataacgtaagttatacccagaattacacacagcatctgttgataagccaggctttaactgccatgtcatgtgcgacaggtgattggaactgatgtttttttgtctaaattgcagggaaaggacgcaaaaaaagcggcattaagccgcttccaggagtgcagggcatggttagccgatcagctatacagcagattcaaaatatcgcctatatgtttacttgtctctgactggggcgggtccccagttgaggcagggcgttggcgcttttcttgttcttgtgcggagtgcggcggtgagatcatgtttcgtccgctctgggaaagcggggggacatttccaataccaatgactttagaacctctcaagctatcagcatgcttgcggtcgcgtttcagcaaccatcctgtacctgtcattttgcacaacttgtcgagattcaaacggcgcacccctggttcactggtgaacattgctgtacccatctcatcgcaggcatagcggcgcacttgcttagtgggttcggcccatccaagggcgatcataatttttaggctacgccgagcacgcgcaatgtcagcggccttctggcttccgtaggccaattgagcaatatcggcaagcgtgtagcgatgccaacgtccgccgactggatttggtttaccgatgaagccggtacgcacatcaaccaaattcatgagcaagacggccaaagcaagcaacgattcagcgccatcagaacgcaaggtgcgtatacgatcaaaggcacgagcaaatggataagcggcaatgatggcagccttaccaaggatcaaccacaaagaaccatgccgctgctcaatgctcttgatgagctggccggtagtcgcctcaatcacaccagggcggcgctttccacttggtggacgccatttgacgcgcttgtgagcgcgactcccatcacttatttttgccatgtcccgcgcccgtcatcggctgcgagacagaatggcttttttgttgccagttcattcttgtccctattgcaagggcttacaggaagaactacaatggcgtctctcatctcgccagtgtttgtttctttttttgttctttctgtttgttctttctgtaagcactggtttctgaaaaaaccgtctcctttccagaggcggttttttcttttatatcaataataatatctgtcgataatatgtcttggtaccccccacacccccctactcgctcgtaactgagtacccacgaccggctaggttcgcgcaaaaggccaacatgacctctaggggaacccactccatgaagccaatggcacgagaacgggaggtatcgctacaggtgagcatcctacgagcactacggagccgataacgatcacccgagctgcgagcgtctgagacgcgccaggagcgcaccaaacggcgataagcgaaataccccccatcaccacgctcacgatgatcctgtagatcgatacgaagggcatcagacacaggccaatagccacccttaccccaaacacggcccgtaagccctttccagccttcagggagattctcagaacaacgctggtaatggcgcacgcctcgggcggcgtgcttgctcacgtactgaaaccatccgacaaccccatcaataatccgaccatgctgcccacgcagaccagcaccacaggaggacgcaacagccaaccacgcatcgacgcatagaagcacatcgtaaacagtgccagaaaaccagatagcacaatgcaaatgcgggacacctcgacgctgccactccgtcacccagtgaaccctgatcataccagcacgcctcatgcgagcttcccacgcacgcctgattttctgccactcctgagcagtaggagggcaatcacgaacggtaagggtcaaagcgagaccagcgcccgttaactgatcctcacgaacggacatgaggaactctgtattgcgacggacagccccaggagaccacccctgaacctcgcctcgtggcgtcctgatatgtgatgagttcatgggagcaacaccaccttttcccccatgacggtaaactgtaattactggcatcggcctctccgatagctggtcacgaccccgggtgctcgtaacaccgcggggttatttttttgccgcatgcaggaaggaggaaaaacccccaaccttaacaaaacgtacagatatgtaaccactaatcaagggaggatggaaatcccccccgtttcgcactcgcttcgctcgctcaaaagcgggggagatttctattccccaatgacaatttgtcaagcaatcacttgacgttaaatccaagggggttgaactgaatgtcatccaattggagaccactggaaacctagatttccacccaggggacacagggcgtaaaaacggttatccgtgaaatagatcagggcttcgtgttgggggtcatttggcccccacataacggaccgaaggagagggcgtaaaagcgcctccgcagggg

We claim:

1. Computer readable medium having recorded thereon a nucleic acid molecule from X. fastidiosa genome.

2. The computer readable medium of claim 1, consisting of a floppy disc, a hard disc, random access memory, read only memory, or CD-ROM.

3. The computer readable medium of claim 1, wherein said nucleic acid molecule is from X. fastidiosa chromosome.
